(19) United States
(12) Patent Application Publication
(10) Pub. No.: US 2020/0102353 A1
(43) Pub. Date: Apr. 2, 2020

(54) HUMAN ENDOGENOUS RETROVIRAL PROTEIN

(71) Applicant: INSTITUT GUSTAVE ROUSSY, VILLEJUIF CEDEX (FR)

(72) Inventors: Odile HEIDMANN, PARIS (FR); Thierry HEIDMANN, PARIS (FR)

(21) Appl. No.: 16/713,930

(22) Filed: Dec. 13, 2019

Related U.S. Application Data
(63) Continuation of application No. PCT/EP2018/066837, filed on Jun. 22, 2018.

(30) Foreign Application Priority Data
Jun. 22, 2017 (EP) 17305775.3

(51) Int. Cl. C07K 14/005; C12N 7/00; C07K 16/10; G01N 33/574

(52) U.S. Cl. CPC C07K 14/005; C12N 7/00; C07K 16/1036; G01N 33/574; C07K 2317/569; C07K 2317/622; C07K 2317/54; C07K 2317/55; C12N 2740/10022

(57) ABSTRACT

Disclosed is human endogenous retroviral protein. This human endogenous retroviral protein is herein generally referred to as HEMO. The application relates more particularly to shed forms of the HEMO protein, more particularly to those shed forms, which are released in the circulating blood. The application also relates to products deriving from the shed forms of HEMO, such as antibodies, nucleic acid vectors and engineered cells, as well as to the medical or biotechnological applications of these shed forms or derived products, notably in the fields of placental development, fetus protection, cancer treatment and stem cell production.

### FIELD

[0001] The application relates to a human endogenous retroviral protein, more particularly to the human endogenous retroviral protein, which is coded by gene ERVMER34-1 (ORF LP9056). This human endogenous retroviral protein is herein referred to as Human Endogenous MER34 ORF, i.e., HEMO. The HEMO protein is conserved among the Boreoeutheria, more particularly among the Euarchontoglires and Laurasiatheria, more particularly among the primates.

[0002] The application relates more particularly to shed forms of the HEMO protein, more particularly to those shed forms of HEMO, which are released in the circulating blood. The application also relates to products deriving from the shed forms of HEMO, such as antibodies, nucleic acid vectors and engineered cells, as well as to the medical or biotechnological applications of these shed forms or derived products, notably in the field of placental development, fetus protection, cancer diagnostic, cancer treatment and stem cell production.

### BACKGROUND

[0003] Endogenous retroviral sequences represent approximately 8% of the human genome. These sequences (called HERVs for Human Endogenous Retroviruses) share strong similarities with present-day retroviruses, and are the proviral remnants of ancestral germ-line infections by active retroviruses which have thereafter been transmitted in a Mendelian manner. The >30 000 proviral copies found in the human genome can be grouped into about 80 distinct families, with most of these elements being non-protein-coding due to the accumulation of mutations, insertions, deletions and/or truncations. Yet, some retroviral genes have retained a coding capacity, and some of them have even been diverted by remote primate ancestors for a physiological role. This is the case of the so-called «syncytins», namely syncytin-1 and syncytin-2 in humans, which are retroviral envelope (env) genes captured 25 and 40 Mya, respectively, with a full-length protein-coding sequence, a fusogenic activity, and strong placental expression (Mi et al. 2000; Blond et al. 2000; Blaise et al. 2003; Lavialle et al. 2013). These genes have been demonstrated to be involved in placenta formation, with their fusogenic activity contributing to the formation of the syncytiotrophoblast at the materno-fetal interface, as a result of the syncytin-mediated cell-cell fusion of the underlying mononucleated cytotrophoblasts. Syncytins were thereafter identified in all placental mammals where they have been searched for, and their unambiguous role in placentation was demonstrated via the generation and characterization of knock-out mice. Syncytins are also present in Marsupials, where they are expressed in a short-lived placenta which is very transiently formed (a few days) before the embryo pursues its development in an external pouch.

[0004] Previous systematic searches for genes encoding endogenous retroviral Env proteins within the human genome have led to the identification of 18 genes with a full-length coding sequence (among which syncytin-1 and -2) (de Parseval et al. 2003; Villesen et al. 2004). These analyses have been performed using methods based on the search for characteristic motifs carried by retroviral Envs, which notably include, from the N- to the C-terminus,
[0005] a signal peptide,
[0006] a (canonical) furin cleavage site (R-X-R/K-R) between the surface (SU) and transmembrane (TM) subunits, with the latter carrying additional signatures including an immunosuppressive domain (ISD, 17 aa motif) which is also found in most oncoretroviruses,
[0007] a characteristic C-(X)6-7-C motif, and
[0008] a transmembrane hydrophobic domain anchoring the Env protein in the cell or virion membrane (de Parseval et al. 2005; Henzy et al. 2013).

[0009] The application relates to a human endogenous retroviral Env protein, which shares some but not all the structural features of the prior art human endogenous retroviral Env proteins, and which demonstrates unprecedented characteristics, more particularly unprecedented shedding characteristics.

### SUMMARY

[0010] The application relates to the human endogenous retroviral protein, which is coded by gene ERVMER34-1 (ORF LP9056). The protein is herein generally referred to as HEMO, which stands for Human Endogenous MER34 ORF.

[0011] The inventors demonstrate that the gene coding for the HEMO protein entered the genome of a mammalian ancestor more than 100 Mya, and that the HEMO protein is conserved among the Boreoeutheria, more particularly among the Euarchontoglires and Laurasiatheria, more particularly among the Euarchontoglires more particularly among the primates (cf. e.g., FIG. 10B).

[0012] By contrast to the prior art human endogenous retroviral Env protein, the human HEMO protein lacks the canonical furin cleavage site (it lacks the canonical R-X-R/K-R site, but shows an unusual CTQG site (at positions 352-355 in FIG. 1C)), and lacks the adjacent hydrophobic fusion peptide (cf. FIGS. 1A, 1B and 1C).

[0013] The HEMO demonstrates unprecedented characteristics, more particularly unprecedented shedding characteristics. Indeed, the ectodomain of the HEMO protein is cleaved by shedding, resulting in the release of HEMO ectodomain fragments in the circulating blood (cf. FIG. 13). The major soluble fragment produced by shedding of human HEMO extends from the first amino acid after the signal peptide up to (and including) the amino acid at position 432 or 433 (cf. FIG. 1C: from amino acid at position 25, 26 or 27, i.e., L, to amino acid Q at position 432 or amino acid R at position 433; cf. FIG. 13: cleavage site n° 1). Secondary soluble fragments include human HEMO fragments, which extend from the first amino acid after the signal peptide up to (and including) an amino acid at a position chosen from among positions 450-480 and 380-420 (cf. FIG. 13, cleavage sites n° 2 and 3) and 421-449.

[0014] The HEMO protein is highly expressed by stem cells and also by the placenta, resulting in an enhanced concentration in the blood of pregnant women. It is also expressed in some (human) tumors, thus providing a marker for a pathological state as well as, possibly, a target for immunotherapies.

[0015] The HEMO protein can be perceived as a “stemness” marker of the normal cell, and as a “target” for cancer immunotherapy.

[0016] The application relates more particularly to the shed forms of the HEMO protein, more particularly to the shed forms of HEMO, which are released in the circulating blood.

[0017] The application also relates to products, which derives from the shed forms of HEMO, such as antibodies, nucleic acid vectors and engineered cells.

[0018] The application also relates to the medical or biotechnological applications of these shed forms or derived products, notably in the fields of placental development, of fetus protection, of cancer treatment, and of stem cell production.

[0019] The application notably relates to means, which are useful for:
[0020] cancer diagnostic,
[0021] tumor typing,
[0022] cancer immunotherapy,
[0023] screening for therapeutic agents, e.g., screening for agents, which may be useful in the treatment of cancer (including palliation or prevention of cancer), or for agents, which may be useful in the treatment of a defect in placenta development (e.g., placental abruption, pre-eclampsia, eclampsia), or for agents, which may be useful in fetus protection (e.g., protection against viral or microbial infection),
[0024] purification of circulating cells (e.g., purification of tumoral circulating cells, or of circulating trophoblasts), and
[0025] production of induced pluripotent stem cells (from somatic cells).

### BRIEF DESCRIPTION OF THE FIGURES

[0026] The file of this patent contains at least one drawing executed in color. Copies of this patent with color drawings will be provided by the Patent and Trademark Office upon request and payment of the necessary fee.

[0027] Some of the figures, to which the present application refers, are in color. The application as filed contains the color print-out of the figures, which can therefore be accessed by inspection of the original application file.

[0028] FIGS. 1A, 1B, 1C and 1D: Structure of a canonical retroviral Env protein and characterization of the human HEMO Env.

[0029] (A) Schematic representation of a retroviral Env protein, delineating the SU and TM subunits. The furin cleavage site (consensus: R-X-R/K-R) between the two subunits, the C-X-X-C motif involved in SU-TM interaction, the hydrophobic signal peptide (purple), the fusion peptide (green), the transmembrane domain (red), and the putative immunosuppressive domain (ISD) (blue) along with the conserved C-X5/6/7-CC motif are indicated.

[0030] (B) Hydrophobicity profile of HEMO Env. The canonical structural features highlighted in A are positioned and shown in the color code used in A. The mutated furin site (CTQG) is shown as a dotted line.

[0031] (C) Amino acid sequence of the HEMO Env protein with the same color code.

[0032] (D) Retroviral Env protein-based phylogenetic tree with the identified HEMO-Env protein. The maximum likelihood tree was constructed using the full length SU-TM amino acid sequences from HERV Envs (including a HERV-K consensus), all previously identified syncytins and a series of endogenous and infectious retroviruses. The length of the horizontal branches is proportional to the average numbers of amino acid substitutions per site (see the scale bar at the lower left), and the percent bootstrap values obtained from 1,000 replicates are indicated at the nodes. ALV, avian leukemia virus; BaEV, baboon endogenous virus; BLV, bovine leukemia virus; Env-Cav1, syncytin-like Cavia porcellus Env1 protein; FeLV, feline leukemia virus; FIV, feline immunodeficiency virus; GaLV, gibbon ape leukemia virus; HERV, human endogenous retrovirus; HIV1, HIV type 1; HTLV-2, human T-lymphotropic virus type 2; mIAPE, Mus musculus intracisternal A-type particle with an env gene; JSRV, Jaagsiekte sheep retrovirus; KoRV, koala retrovirus; MMTV, murine mammary tumor virus; MoMLV, Moloney murine leukemia virus; MPMV, Mason-Pfizer monkey virus; PERV-A, porcine endogenous retrovirus; RD114, feline endogenous type-C retrovirus; ReV-A, Reticuloendotheliosis Virus type A, BIV, Bovine immunodeficiency Virus; Env-panMars, conserved Marsupial Env-2.

[0033] FIGS. 2A, 2B, 2C, 2D, 2E and 2F: Characterization of the HEMO env gene.

[0034] (A) Schematic representation of the HEMO gene locus on chromosome 4 (4q12, with the GRCh38 assembly coordinates of the Genome Reference Consortium).

[0035] Top: MER34-int consensus (Repbase) with putative gag, pro and pol retroviral ORFs indicated according to consensus aminoacid sequences. Dot lines delineate parts of the MER34 sequences found in the HEMO locus.

[0036] Middle: the HEMO gene locus (11 kb) is located between the RASL11B gene (^{˜}120 kb 5′) and the USP46 gene (^{˜}120 kb 3′). HEMO env ORF is shown as an orange box, repetitive sequences identified on the Dfam.org web site, are shown as different colored boxes with the sense sequences above and anti-sense sequences below the line. Of note, the gene is part of a MER34 provirus which has kept only degenerate pol sequences (mostly in opposite orientation), a truncated putative 3′LTR (MER34-A) and no 5′LTR. No other MER34 sequences are found 100 kb apart from the gene. A CpG Island (chromosome 4:52750911-52751703), detected by the EMBOSS-newcpgreport software, is indicated as a green box.

[0037] Bottom: intron-exon structure predicted from NCBI and RNA transcripts: exons found in placental RNA, as determined by 5′ and 3′ RACE experiments, are indicated with the main E1-E2-E4 spliced env subgenomic transcript below. Start site nucleotide sequence (ACTTC . . . ) and acceptor splice site for the HEMO env ORF are depicted. Arrows specify qRT-PCR primers (Table 4).

[0038] (B) Real-time qRT-PCR analysis of the HEMO transcripts in a panel of 20 human tissues and 16 human cell lines. Transcript levels are expressed as percent of maximum and were normalized relative to the amount of housekeeping genes (see Methods). Placenta values are the means of 12 samples from 1st trimester pregnancies and other tissues are from a commercial panel (Zyagen).

[0039] (C) CpG island promoter sequence around the Transcription Start Site (+1, ACTTC in red), with CG dinucleotides in green highlighted. Exon1 and exon2 are boxed. Nucleotide sequences in grey represent primer sequences used for amplification of the two fragments (I and II, vertical bars on the left) analyzed after bisulfite treatment (panel E).

[0040] (D) Luciferase assay of the CpG Island promoter.

[0041] Top. Schematic representation of the promoter-luciferase constructs with the CpG island (in green) containing exons E1 and E2. E2 was shortened at its 3′ end, 28 bp upstream of the donor splice site, to limit splicing out of the luciferase gene.

[0042] Bottom. Promoter sequences in each pGL3 construct are indicated as white boxes, with coordinates relative to the +1 Transcription Start Site of the gene. Control (none) corresponds to the basic pGL3 vector, with no inserted sequence. Promoter activity, expressed in light unit (LU), was determined using the Luciferase reporter assay, in lysates from 293T cells transfected with the pGL3 vectors. The plotted data are the average from three independent experiments.

[0043] (E) Methylation status of the HEMO promoter region as revealed by bisulfite treatment of the genomic DNA from cell lines not expressing (293T and BeWo cells) or expressing (iPSC and CaCo-2) the HEMO gene, and PCR amplification of fragments I (26 CpG) and II (33 CpG) delineated in panel C. The graph represents the sequencing of 10 clones for each PCR-amplified fragment, with methylated (black circle) and un-methylated (white circle) CpG indicated.

[0044] (F) Effect of DNA demethylation on expression of the HEMO gene. HEMO gene transcription levels were detected by RT-qPCR and normalized to the housekeeping gene RPLPO, in cell lines (293T, BeWo) untreated (DMSO alone) or treated with 0.1 to 5 μM of 5-Aza-2′-deoxycytidine (Aza-dC) for 3 days. Data are presented as the mean+/−SEM. Asterisks (*) indicate values significantly different from that obtained with untreated cells (unpaired two-tailed t test; *, P<0.05; ***, P<0.001).

[0045] FIG. 3: Immunofluorescence analysis of HEMO protein expression in transfected HeLa cells.

[0046] Cells (HeLa) were transfected with the phCMV-HEMO expression vector (or an empty vector as a negative control), fixed, permeabilized (upper panel) or not permeabilized (lower panel), and stained for HEMO protein expression using a specific anti-HEMO polyclonal antibody (see Methods). Upper panel: Specific staining of the phCMV-HEMO transfected cells versus empty vector transfected cells. Lower panel: Successive confocal images demonstrate cell surface localization of the protein.

[0047] FIGS. 4A, 4B and 4C: Characterization of the shed HEMO protein.

[0048] (A) Detection of the shed HEMO Env protein by Western Blot analysis. (Left) Detection of the syncytin-1 protein with the anti-Env-W polyclonal antibody in the cell lysate of phCMV-Env-W transfected 293T cells. (Center and Right) Detection of the two forms of the HEMO protein (full-length SU-TM and Shed Env) with the anti-HEMO polyclonal antibody in the cell lysate and supernatant of phCMV-HEMO transfected 293T cells (Center) and first trimester placental tissue and placental blood (Right; matched representative samples from the same individual); samples were treated (+) or not (−) with PNGase F.

[0049] (B) Mass spectrometry determination of the N- and C-termini of the shed HEMO protein. Protein coverage of the Shed Env form, purified from the supernatant of phCMV-HEMO transfected 293T cells, is shown in green characters after trypsin proteolysis and mass spectrometric characterization of the resulting peptides, and with underlined characters for chymotrypsin proteolysis (see Methods). The HEMO N- and C-termini are indicated by a capital letter, and (*) indicates the positions of the stop codons in the mutants generated and analyzed in C.

[0050] (C) Migration pattern of the mutant HEMO forms, analyzed as in A. Left: schematic representation of the HEMO protein with the stop codons of the generated mutants positioned, together with that of the mutant with a reconstituted furin site (H-fur+, with a RTKR furin site). Right: Supernatant of 293T cells transfected with the expression vectors for the wild type (WT) and the mutant HEMO plasmids, analyzed after PNGase F treatment, SDS gel electrophoresis, and western blot as in A.

[0051] FIG. 5: Inhibition of HEMO release in the supernatant of transfected cells.

[0052] Western blot analysis of cell lysate and supernatant of 293T cells transfected with the phCMV-HEMO expression vector, using the polyclonal anti-HEMO polyclonal antibody (see Methods). Cells were treated for 3 days, with the indicated doses of the ADAM and MMP chemical inhibitors Batismastat, Marismastat, and GM6001 or DMSO alone. Anti-γ-tubulin antibody was used as a control of cell lysate protein loading. The full-length HEMO-protein (SU-TM) and the secreted form (Shed Env) are indicated by arrowheads.

[0053] FIG. 6: Release of the HEMO protein in the peripheral blood during pregnancy.

[0054] Western blot analysis of purified blood samples, with the polyclonal anti-HEMO antibody (upper panel) and anti-hCG-beta antibody (lower panel). The shed HEMO protein is detected in the placental blood from 1st trimester pregnancy (T1), and from peripheral blood of men (M), non-pregnant women (F), and pregnant women from 1st (T1), 2nd (T2) and 3rd (T3) trimesters. Bands observed at both higher and lower MW might correspond to minor alternatively processed/shed forms of the HEMO protein.

[0055] FIGS. 7A, 7B and 7C: Immunohistochemical detection of the HEMO protein in formalin-fixed tissues of first trimester human placenta.

[0056] (A) Schematic representation of the feto-placental unit with an enlarged anchored villus bathed by maternal blood and displaying the syncytiotrophoblast (ST) layer, the underlying mononucleated cytotrophoblasts (CT) and the invading extravillous cytotrophoblasts (EVT).

[0057] (B) Serial sections of multiple placental villi and chorionic membrane stained with a control IgG2a mouse isotype (left) or with the anti-HEMO monoclonal antibody 2F7 (right, CNCM I-5211). Magnification 4×.

[0058] (C) Enlarged views of the 4 domains delineated in B: placental villi with preferential CT (1-2) and EVT (3) staining; chorionic membrane with CT staining (4). Magnification 60×.

[0059] FIGS. 8A, 8B, 8C and 8D: Expression of the HEMO gene during development by in silico RNA-seq analysis.

[0060] A-C: In silico analysis of three panels of RNA-seq data, for HEMO, syncytin-1 (env-W) and -2 (env-FRD), GCM1 (Glial Cells Missing homolog 1, a specific placenta-expressed gene) and OCT4 (highly expressed in stem cells). RNA-seq raw data were screened with the coding part of each gene and hits were reported in log scale, per kilobase of screened sequence and after normalization with two house-keeping genes, RPLPO and RPS6.

[0061] (A) panel of 124 single-cell RNA-seq of human preimplantation embryos and embryonic stem cells (similar patterns were obtained from data in ref. (30), that covered the oocyte to morula stages).

[0062] (B) panel of 7 samples of normal placental tissues.

[0063] (C) panel of 28 RNA-seq samples from the reprogramming of human CD34+ cells (NT) to iPS cells and from human ES cell lines.

[0064] D: Western Blot analysis of WGA-purified placental blood (first trimester pregnancy) and of WGA-purified supernatant of confluent iPSC-cloneN, (grown an extra-36 h without serum and concentrated 20×). Samples were treated with PNGase F. The shed HEMO form is detected using the polyclonal anti-HEMO antibody.

[0065] FIGS. 9A, 9B, 9C and 9D: Microarray analysis of HEMO expression within normal tissues and tumor samples.

[0066] (A, B) Box plot representations of normalized values obtained for HEMO gene expression, extracted from the E-MTAB62 dataset (on a logarithmic scale). Original tissue categories were adjusted to group together samples from the same biological source, keeping the major groups described by the authors: normal tissues (A), and tumor samples (B).

[0067] (C) Box plot representation of normalized values obtained from an enlarged ovarian tumor sample, extracted as raw.CEL files from various AE and GEO studies (see Methods). Values for normal ovarian tissues were included, as control, in the normalization process. Tumoral ovarian histotypes correspond to 60 Clear Cell Carcinoma, 96 Endometrioid, 34 Mucinous and 289 Serous tumoral samples. (Wilcoxon's rank sum test; **, P<0.01).

[0068] (D) Immunohistochemical analysis using the 2F7 monoclonal antibody (CNCM I-5211) specific for the HEMO protein (or a control isotype), of formalin-fixed normal ovarian tissues (left) and ovarian Clear Cell Carcinoma (right, at two magnifications).

[0069] FIGS. 10A, 10B and 10C: Sequence conservation and purifying selection of the HEMO gene in simians.

[0070] (A) Syntenic conservation of the HEMO locus in mammalian species. The genomic locus of the HEMO gene, on human chromosome 4, along with the surrounding RASL11B and USP46 genes (275 kb apart), was recovered from the UCSC Genome Browser together with the syntenic loci of the chimpanzee, macaque, marmoset, tarsier, mouse lemur, colugo, mouse, guinea pig, rabbit, hedgehog, cow, horse, dog, cat, elephant, tenrec, armadillo and opossum genomes; exons of the RASL11B and USP46 genes and the sense of transcription (arrows) are indicated. Exons of the HEMO gene (E1 to E4) are shown on an enlarged view of the 15 kb HEMO locus, together with the homology of the syntenic loci (analyzed using the MultiPipMaker alignment-building tool). Homologous regions are shown as green boxes, and highly conserved regions (more than 100 bp without a gap displaying at least 70% identity) are shown as red boxes. Sequences with (+) or without (−) a full-length HEMO ORF are indicated on the right (nr: not relevant).

[0071] (B) HEMO-based maximum likelihood phylogenetic tree was determined using nucleotide alignment of the HEMO gene, inferred with the RAxML program. The horizontal branch length and scale indicate the percentage of nucleotide substitutions. Percent bootstrap values obtained from 1.000 replicates are indicated at the nodes. Double-entry table for the pairwise percentage of amino acid sequence identity (lower triangle) and the pairwise value of dN/dS (upper triangle) between the HEMO gene from the various simian species listed on the phylogenetic tree to the left and listed in the same order in abbreviated form at the top. A color code is provided for both series of values. (OWM: Old World Monkeys; NWM: New World Monkeys; AGM: African Green Monkey; m.: monkey).

[0072] (C) Conservation of HEMO shedding in simians illustrated by Western blot analysis of 293T cells transfected with expression vectors for the indicated simian HEMO genes, or for the human HEMO mutant with a consensus furin site (H-fur+). Cell lysates and supernatants were harvested and treated with PNGase F prior to Western blot analysis with the polyclonal anti-HEMO antibody. The entire SU-TM HEMO protein is the main form observed in cell lysates, whereas the shed and the free SU form (for the NWM genes with a furin site and the H-fur+ mutant) are mainly observed in the supernatants.

[0073] FIGS. 11A and 11B: Aligned amino acid sequences of the simian HEMO proteins. The characteristic domains are delineated, with the putative proteolytic furin cleavage site (RXKR, in black) between the SU and TM subunits, the signal peptide (in purple) and the CWLC motif (CXXC, black) in the SU subunit, the immunosuppressive domain (ISD, blue), C6XCC sequence (black) and the transmembrane domain (red) in the TM subunit. Dots indicate amino acid identity and hyphens codon deletions. HUM (human); CPZ (chimpanzee); GOR (gorilla); ORA (orang-outan); GIB (gibbon); MAC (macaque); BAB (baboon); AGM (African Green Monkey); COL (Colobus); LAN (langur); RHI (rhinopithecus); MAR (marmoset); SQM (squirrel monkey); SPI (spider monkey); SAK (saki).

[0074] FIGS. 12A, 12B, 12C, 12D and 12E: Characterization of the marsupial env-panMars gene and protein.

[0075] (A, B and C) Amino acid sequence homology between marsupial env-panMars and HEMO proteins from representative simian species and domestic cat. Every amino acid of a marsupial sequence which is found at the same position in a simian or cat sequence is highlight in yellow. Asterisk (*): stop codon. HUM (human), GIB (gibbon), MAC (macaque), MAR (marmoset), CAT (cat), OPO (opossum), WAL (Wallaby) and TAS (Tasmanian Devil). Same color code for the characteristic env domains as in FIG. 1C.

[0076] (D) Detection of the HA-tagged Opossum and Wallaby env-panMars proteins. Western Blot of cell lysates (L) and supernatants (S) from 293T cells transfected with the phCMV-empty, phCMV-Opossum-env or phCMV-Wallaby-env expression vectors. Detection with an anti-HA antibody (upper), and with an anti-γ-tubulin antibody (lower).

[0077] (E) Structure of the env-panMars gene locus and transcripts for the opossum (upper) and wallaby (lower). Schematic representation of the env-panMars locus, with the env-ORF in orange and the CpG island in green. N represents uncharacterized sequences. Black arrowhead positions the AATAAA polyadenylation signal sequence. Intron-exon structures are from UCSC for the Opossum and were characterized by RACE-PCR experiments for the Wallaby (RNA from the ovaries); nucleotide sequences of the start site (CTTTCTA . . . ) and of the env ORF acceptor splice site are indicated; E2-E3 intron dotted to indicate E3 skipping in part of the Wallaby transcripts, as observed for the HEMO gene.

[0078] FIG. 13: Schematic representation of the shedding of the HEMO protein.

[0079] “1” is the main cleavage site (C-term end of shed fragment=aa position 432 or 433).

[0080] “2” and “3” are secondary cleavage sites (“2”: C-term end of shed fragment is from among aa positions 450-480; “3”: C-term end of shed fragment is from among aa positions 380-420).

[0081] FIG. 14: Microarray analysis of HEMO expression within tumor samples.

[0082] Box plot representations of normalized values obtained for HEMO gene expression extracted from the GSE2109 dataset (on a logarithmic scale).

[0083] FIGS. 15A and 15B: TGCA RNAseq analysis of HEMO expression within tumor samples.

[0084] (A) Box plot representations of normalized values obtained for HEMO gene expression (on a FPKM scale). This figure is a copy of an internet TCGA data analyses on a panel of 17 different tumor types, using the complete Mer34-cDNA sequence (about 3000 bp including 5′ and 3′ untranslated sequences).

[0085] (B) HEMO expression in RNAseq dataset of a series of TCGA tumors (Head and Neck Squamous Carcinomas, HNSC; Lung AdenoCarninomas, LUAD; Uterine Corpus Endometrial Carcinomas, UCEC), and TCGA controlateral normal tissues (Control).

[0086] FIGS. 16A and 16B: HEMO expression in tumor samples from Gustave Roussy.

[0087] (A) Western blot analysis on frozen samples of ovarian carcinomas (E=Endometrioid, C=Clear cell) and control (N=Normal ovary, PL=Placenta).

[0088] (B) HES staining and HEMO Immunochemistry analysis on FFPE samples of Endometrioid ovarian carcinoma from two patients (I and II), at different magnifications. Normal ovary control is shown in FIG. 9D.

[0089] FIG. 17: HEMO expression in tumor samples from Gustave Roussy.

[0090] HES staining and HEMO Immunochemistry analysis on FFPE samples of endometrioid uterine carcinomas from two patients (I and II) at different magnifications.

[0091] FIG. 18: HEMO expression in tumor samples from Gustave Roussy.

[0092] HES staining and HEMO Immunochemistry analysis on FFPE samples of breast carcinomas from two patients (HER2+ and Triple Neg) and normal tissue control, at different magnifications.

[0093] FIGS. 19A and 19B: Development of a blood-ELISA assay for detection of circulating HEMO shed protein.

[0094] (A) Schematic representation of a sandwich ELISA.

[0095] (B) ELISA analysis of circulating HEMO shed protein in woman blood sera.

[0096] FIGS. 20A and 20B: Antibodies raised against the C-terminal part of the HEMO-ectodomain

[0097] (A) Western blot analysis of transfected 293T (1=full-length HEMO-pHCMV vector, 2=SU-HEMO-pHCMV vector, 3=TM-HEMO-pHCMV vector and 4=post-SHED-HEMO-pHCMV vector) cell lysates with HTM5-polyclonal antibody.

[0098] (B) Flow cytometry analysis of transfected 293T cell (left=empty vector, middle=full-length HEMO vector and right=post-SHED HEMO vector) with HTM5-polyclonal antibody. The HTM5 antibody can detect the native form of the full length-HEMO and the C-terminal part of the ectodomain.

[0099] FIGS. 21A, 21B and 21C: KO (Knock-Out) cell clones for HEMO by CrispR-Cas9.

[0100] (A and B) Immunochemistry and Western blot analysis of WT (Wild Type) and KO-HEMO CaCo-2 cells or supernatants with 2F7 monoclonal antibody (CNCM I-5211). HEMO cannot be detected in CaCo-2 KO HEMO cells, neither by IHC on FFPE cell pellet samples (A), nor in concentrated (20×) supernatant (B).

[0101] (C) Western Blot analysis of WT iPSC supernatant, CrispR-KO iPSC supernatants (from cell clones 1, 2 and 3) and non-KO(control CrispR-treated) iPSC supernatant (T) with 2F7 monoclonal antibody (CNCM I-5211). HEMO cannot be detected in supernatant of CrispR-KO iPSC.

[0102] FIGS. 22A and 22B: Cloning of the mAB as ScFv fragments.

[0103] (A) ELISA analysis of transfected 293T cell (empty vector or full length HEMO vector) supernatant with ScFV-2F7-Fc and 2F7 monoclonal antibody (CNCM I-5211). HEMO is only detected in 293T cell expressing HEMO by both ScFV-2F7-Fc and 2F7 monoclonal antibody (CNCM I-5211).

[0104] (B) Flow cytometry analysis of transfected 293T cell (empty vector or full length HEMO vector) with ScFV-2F7-Fc, ScFv-2F7-His and 2F7 monoclonal antibody (CNCM I-5211). HEMO is only detected in 293T cell expressing HEMO by both ScFV fragments (with Fc and His-Tag) and 2F7 monoclonal antibody (CNCM I-5211).

### DETAILED DESCRIPTION

[0105] The application relates to the subject-matter as defined in the claims as filed and as herein described.

[0106] In the application, unless specified otherwise or unless a context dictates otherwise, all the terms have their ordinary meaning in the relevant field(s).

[0107] The application relates to a retroviral Env protein, which is endogenous to the Boreoeutheria mammal clade, more particularly to humans, i.e., to a Human Endogenous RetroVirus (HERV) protein.

[0108] Said retroviral Env protein has been named HEMO by the inventors. HEMO stands for Human Endogenous MER34 ORF, but the HEMO protein is not restricted to humans: the HEMO protein is expressed in non-human Boreoeutheria, such as e.g., in non-human primates, as well as in humans (please see FIGS. 10A and 10B).

[0109] The RNA transcript of human HEMO has been described in the prior art, e.g., in UNIPROTKB under number Q9H9K5 (MER34_HUMAN) [Name: ERVMER34-1; ORF Name: LP9056]. The sequence of a putative protein has been deduced from said prior art RNA sequence, but the actual occurrence of the protein was hypothetical only.

[0110] The inventors provide the demonstration that the protein is actually expressed, and that it is expressed in Boreoeutheria, more particularly in humans. The inventors further describe new functions (characteristics) of the protein.

[0111] HEMO is a transmembrane protein: it consists of a signal peptide (which is cleaved off to form the mature protein), an ectodomain, a transmembrane domain and an intracellular domain.

[0112] Illustrative sequences of the HEMO proteins comprise:
[0113] the human HEMO amino acid sequence of SEQ ID NO: 1 (cf. FIG. 1C, FIG. 1B; cf. sequence HUM in FIGS. 11A-11B and 12A-12C), and
[0114] the non-human HEMO proteins of SEQ ID NO: 129-143 (cf. FIGS. 11A-11B and 12A-12C), which are the HEMO protein sequences of chimpanzee (CPZ), gorilla (GOR), orangutan (ORA), gibbon (GIBB), macaque (MAC), baboon (BAB), African Green Monkey (AGM), Colobus (Angolensis palliates) (COL), Langur (LAN), Marmoset (MAR), Rhinopithecus (roxellana) (RHI), Squirrel monkey (SQM), Spider monkey (SPI), Saki monkey (SAK), and cat (CAT), respectively.

[0115] In the application, the HEMO reference amino acid sequence, notably for computation of amino acid positions, is the human HEMO protein sequence that includes the N-terminal signal peptide, i.e., the sequence of SEQ ID NO: 1 (563 amino acids).

[0116] The sequence alignments shown in FIGS. 11A-11B and 12A-12C enable to identify corresponding positions in non-human Boreoeutheria.

[0117] The inventors notably demonstrate that in Boreoeutheria, more particularly in humans, the HEMO protein is highly expressed by placental cells, by stem cells, and by some tumor cells.

[0118] The application generally relates to the HEMO protein, the HEMO ectodomain, the HEMO transmembrane domain, and the HEMO intracellular domain, as well as to fragment of these domains.

[0119] The inventors further demonstrate that the HEMO protein is cleaved by shedding. Soluble fragments of the HEMO protein can therefore be found in the blood of the Boreoeutheria, more particularly in the circulating blood.

[0120] The inventors demonstrate more particularly that the HEMO protein is shed in its ectodomain.

[0121] The shedding of the HEMO ectodomain results in the release of soluble fragments, which are N-terminal fragments of the HEMO ectodomain. The C-terminal fragment that results from the cleavage of a (soluble) N-terminal fragment is retained at the cell surface.

[0122] The application therefore generally relates to fragments of the HEMO protein, more particularly to fragments of the HEMO ectodomain. The application relates more particularly to:
[0123] soluble fragments of the HEMO ectodomain, more particularly to N-terminal soluble fragments of HEMO ectodomain, and to
[0124] the fragments of the HEMO ectodomain or of the HEMO protein that result from the shedding of a soluble fragment of HEMO ectodomain, more particularly to the C-terminal fragments of HEMO ectodomain or protein that result from the shedding of a N-terminal soluble fragment of

[0125] HEMO ectodomain.

[0126] The inventors have identified at least three different cleavage sites in the HEMO ectodomain. The main cleavage site locates in the immunosuppressive domain of the HEMO ectodomain. Other cleavage sites may locate upstream or downstream said immunosuppressive domain (in N- to C-orientation).

[0127] The blood, more particularly the circulating blood of a Boreoeutheria, more particularly of a human, may thus comprise one or several of the following three items:
[0128] one or several soluble (shed) N-terminal fragments of the HEMO ectodomain, and
[0129] one or several cells (or part of cells, e.g. exosomes) that express at their surface a C-terminal fragment of HEMO ectodomain (resulting from the cleavage of one of said soluble (shed) N-terminal fragments).

[0130] Placental cells, stem cells and tumor cells of a Boreoeutheria, more particularly of a human, may thus comprise cells (or part of cells, e.g. exosomes), which express at their surface a C-terminal fragment of HEMO ectodomain (which results from the shedding of a N-terminal fragment of HEMO ectodomain). These cells may be part of a cell tissue (e.g., placental cells of a placenta; tumor cells of a tumor tissue; stem cells, which are contained in the bone marrow or in a normal tissue or in a tumor tissue), or may be circulating cells (e.g., circulating placental cells, circulating stem cells or circulating tumor cells).

[0131] The application notably relates to:
[0132] a polypeptide, which is one of said N-terminal soluble (shed) fragments of HEMO ectodomain, and to
[0133] a polypeptide, which is one of said C-terminal fragments of HEMO ectodomain and to a cell (or part of cells, e.g. exosomes), which expresses said C-terminal fragment at its surface.

[0134] The application also relates to (sub-)fragments of said polypeptides, more particularly to a (sub-)fragment of said N-terminal soluble (shed) fragments of HEMO ectodomain, wherein said (sub-)fragment is useful for antibody production, more particularly for monoclonal antibody production.

[0135] Throughout the application, and unless the context dictates otherwise, a polypeptide [or a polypeptide (sub-)fragment] may be a polypeptide [or a polypeptide (sub-)fragment], which is under soluble form (i.e., non-membranar form).

[0136] Throughout the application, and unless the context dictates otherwise, a polypeptide [or a polypeptide (sub-)fragment, a nucleic acid, a nucleic acid vector] may be a polypeptide [or a polypeptide (sub-)fragment, a nucleic acid, a nucleic acid vector, respectively], which is under isolated (or purified) form.

[0137] The application also relates to products, which derive from said polypeptides, cell or polypeptide (sub-)fragments. The application relates more particularly to:
[0138] a composition, more particularly to a pharmaceutical composition, which comprises at least one polypeptide, cell or polypeptide (sub-)fragment of the application,
[0139] an antibody, a monoclonal antibody, a Fab fragment, a Fab′ fragment, a F(ab)2 fragment, a scFv, a sdAb, or the variable domain of a sdAb, which specifically binds to at least one polypeptide, cell or polypeptide (sub-)fragment of the application,
[0140] an hybridoma, which produces a monoclonal antibody of the application,
[0141] a genetically engineered T cell, more particularly a Chimeric Antigen Receptor T cell (CAR-T cell), wherein the ectodomain of said Chimeric Antigen Receptor (CAR) comprises or is a scFv of the application,
[0142] a nucleic acid, more particularly a RNA, which codes for a polypeptide or polypeptide (sub-fragment) of the application,
[0143] a nucleic acid vector, which recombinantly comprises at least one nucleic acid of the application,
[0144] a host cell, more particularly a genetically engineered cell, which recombinantly comprises at least one nucleic acid or nucleic acid vector of the application,
[0145] a nucleic acid probe, which specifically binds to a nucleic acid of the application, or a set of oligonucleotides, which comprises a primer pair (or a primer pair and a probe), wherein said primer pair (or said primer pair and probe) specifically binds(bind) to a nucleic acid of the application,
[0146] a kit, which comprises at least one of said products, e.g., at least one antibody, monoclonal antibody, Fab fragment, Fab′ fragment, F(ab)2 fragment, scFv, sdAb, sdAb variable domain or CAR-T cell of the application,
[0147] a solid support, such as a synthetic membrane or a nucleic acid chip, onto which is linked at least one of polypeptide, cell or polypeptide (sub-)fragment of the application, or at least one of said products, e.g., a (synthetic) membrane, onto which at least one antibody, monoclonal antibody, Fab fragment, Fab′ fragment, F(ab)2 fragment, scFv, sdAb, sdAb variable domain or CAR-T cell of the application is linked or grafted, or a nucleic acid chip wherein at least one probe of the application is linked or grafted.

[0148] The application relates to the uses or applications of at least one polypeptide, polypeptide (sub-)fragment, cell or product of the application, as well as to methods involving at least one polypeptide or product of the application.

### The HEMO Protein

[0149] The HEMO protein is expressed in Boreoeutheria, more particularly in humans.

[0150] The HEMO protein, more particularly the human HEMO protein, is highly expressed by placental cells, by stem cells, and by some tumor cells.

[0151] Throughout the application, mammals or placental mammals notably include a Boreoeutheria, more particularly an Euarchontoglires or a Laurasiatheria, more particularly an Euarchontoglires, more particularly a primate, more particularly a human or a simian.

[0152] Throughout the application, a Boreoeutheria include an Euarchontoglires or a Laurasiatheria, more particularly an Euarchontoglires, more particularly a primate, more particularly a human or a simian.

[0153] For example, said placental mammal or Boreoeutheria can be a Homo sapiens (a human), a Pan troglodytes (a chimpanzee), a Gorilla (a gorilla), a Pongo (an orangutan), a Hylobates (a gibbon), a Macaca (a macaque), a Papio anubis (a baboon), a Chlorocebus sabeus (an African Green Monkey or AGM), a Colobus angolensis palliatus (a Colobus), a Semnopithecus entellus (a langur), a Rhinopithecus roxellana (a rhinopithecus), a Marmoset (a marmoset), a Saimiri (a squirrel monkey), an Ateles (a spider monkey), or a Pithecia (a saki).

[0154] For example, said placental mammal or Boreoeutheria can be a Homo sapiens (a human), a Pan troglodytes (a chimpanzee), a Gorilla (a gorilla), a Pongo (an orangutan), a Hylobates (a gibbon), a Macaca (a macaque), a Papio anubis (a baboon), a Chlorocebus sabeus (an African Green Monkey or AGM), a Colobus angolensis palliatus (a Colobus), a Semnopithecus entellus (a langur), or a Rhinopithecus roxellana (a rhinopithecus).

[0155] For example, said placental mammal or Boreoeutheria can be a Homo sapiens (a human), a Pan troglodytes (a chimpanzee), a Gorilla (a gorilla), a Pongo (an orangutan) or a Hylobates (a gibbon). More particularly said placental mammal or Boreoeutheria is a Homo sapiens (a human).

[0156] The HEMO protein can be viewed as a retroviral Env protein, which is endogenous to a cell of a Boreoeutheria, more particularly of a human.

[0157] Said cell may e.g., be a placental cell (e.g., a trophoblast cell), a stem cell, a tumor cell or a tumor stem cell.

[0158] Said trophoblast cell may e.g., be a villous cytotrophoblast, an extravillous cytotrophoblast or a chorionic membrane trophoblast.

[0159] Said tumor cell may e.g., be an ovarian cancer, an uterine cancer (more particularly an endometrial cancer, a cervical cancer, a gestational cancer (including placental cancer, e.g., choriocarcinoma)), a breast cancer, a lung cancer, a stomach cancer, a colon cancer, a liver cancer, a kidney cancer, a prostate cancer, an urothelial cancer, a germ cell cancer, a brain cancer, a head and neck cancer, a pancreatic cancer, a thyroid cancer, a thymus cancer, a skin cancer, a bone cancer or a bone marrow cancer. As urothelial cancers encompass carcinomas of the bladder, ureters and renal pelvis, said cancer may also be an urothelial cancer including a bladder cancer, an ureter cancer or a renal pelvis cancer.

[0160] The amino acid or nucleic acid sequences are described in Table 8 below, as well as in the Figures and the Examples. A ST25-compliant sequence listing is also provided.

[0161] The HEMO reference sequence is the sequence of human HEMO protein of SEQ ID NO: 1 (cf. e.g., FIG. 1C or 11A-11B). The HEMO protein of SEQ ID NO: 1 comprises:
[0162] a signal peptide (amino positions 1-26 or 1-24 or 1-25 in SEQ ID NO: 1, i.e., SEQ ID NO: 2, 168 and 169 respectively),
[0163] an ectodomain (amino positions 27-489 or 25-489 or 26-489 or 27-488 or 25-488 or 26-488 or 27-491 or 25-491 or 26-491 or 27-486 or 25-486 or 26-486 in SEQ ID NO: 1, i.e., SEQ ID NO: 4 and 172-182 respectively; or amino positions 25-487 or 25-490 or 25-492 or 26-487 or 26-490 or 26-492 or 27-487 or 27-490 or 27-492, i.e., SEQ ID NOs: 910-918 respectively),
[0164] a transmembrane domain (e.g. amino positions 490-512 or 489-512 or 492-512 or 487-512 or 490-509 or 489-509 or 492-509 or 487-509 or 490-513 or 489-513 or 492-513 or 487-513 in SEQ ID NO: 1, i.e., SEQ ID NO: 5 and 427-437, respectively), and
[0165] an intracellular domain (amino positions 513-563 or 510-563 or 514-563 in SEQ ID NO: 1, i.e., SEQ ID NO: 6, 417 and 418, respectively).

[0166] The sequence of HEMO proteins of Boreoeutheria other than humans can be defined as a sequence, which consists of 517-578 amino acids (more particularly of 536, 562, 527, 517 or 578 amino acids, more particularly of 563 or 562 amino acids, more particularly of 563 amino acids), and which is at least 59% identical to SEQ ID NO: 1 (over the entire length of SEQ ID NO: 1).

[0167] The expression “at least 59% identical” encompasses at least 60%, at least 61%, at least 62%, at least 63%, at least 64%; at least 65%, at least 66%, at least 67%, at least 68%, at least 69%, at least 70%, at least 71%, at least 72%, at least 73%, at least 74%, at least 75%, at least 76%, at least 77%, at least 78%, at least 79%, more particularly at least 80% identical, more particularly at least 80% identical, more particularly at least 81% identical, more particularly at least 82% identical, more particularly at least 83% identical, more particularly at least 84% identical, more particularly at least 85% identical, more particularly at least 86% identical, more particularly at least 87% identical, more particularly at least 88% identical, more particularly at least 89% identical, more particularly at least 90% identical, more particularly at least 91% identical, more particularly at least 92% identical, more particularly at least 93% identical, more particularly at least 94% identical, more particularly at least 95% identical, more particularly at least 96% identical, more particularly at least 97% identical, more particularly at least 98% identical, more particularly at least 99% identical, to SEQ ID NO: 1 over the entire length of SEQ ID NO: 1. Examples of such non-human HEMO proteins comprise the sequences of SEQ ID NO: 129-143 (cf. FIGS. 11A-11B and 12A-12C), which are the HEMO protein sequences of chimpanzee (CPZ), gorilla (GOR), orangutan (ORA), gibbon (GIB), macaque (MAC), baboon (BAB), African Green Monkey (AGM), Colobus (Angolensis palliates) (COL), Langur (LAN), Marmoset (MAR), Rhinopithecus (roxellana) (RHI), Squirrel monkey (SQM), Spider monkey (SPI), Saki monkey (SAK), and cat (CAT), respectively.

[0168] Examples of such non-human HEMO proteins are more particularly the sequences of SEQ ID NO: 129-142 (i.e., from CPZ to SAK), more particularly of SEQ ID NO: 129-138 (i.e., from CPZ to RHI), more particularly of SEQ ID NO: 129-132 (i.e., from CPZ to GIB).

### HEMO Signal Peptide

[0169] The signal peptide of the HEMO protein consists of 24, 25 or 26 amino acids, and comprises the sequence of SEQ ID NO: 405.

[0170] For example, the signal peptide of the HEMO protein may consist of the sequence of SEQ ID NO: 147 (26 amino acids), of SEQ ID NO: 405 (24 amino acids), or of SEQ ID NO: 406 (25 amino acids).

[0171] For example, the signal peptide of the (human) HEMO protein may consist of the sequence of SEQ ID NO: 2 (26 amino acids), of SEQ ID NO: 168 (24 amino acids), or of SEQ ID NO: 169 (25 amino acids).

[0172] The mature form of the HEMO protein does not comprise the signal peptide (which has been cleaved off). The human HEMO protein, which matures after cleavage of the signal peptide, may thus be of SEQ ID NO: 3, 170 or 171 (start positions 27, 25 or 26, respectively).

### HEMO Ectodomain

[0173] The ectodomain of the HEMO protein comprises, in N-term to C-term orientation,

i. a CWLC amino acid sequence,
ii. an amino acid sequence chosen from among the CTQG sequence, the CTQR sequence, the CIQR sequence, the RTQR sequence and the RTKR sequence,
iii. an optional amino acid sequence of SEQ ID NO: 148 (which features the ImmunoSuppressive Domain [or ISD] of the HEMO protein), and
iv. an amino acid sequence of SEQ ID NO: 149,
which are characteristic of retroviral Env protein.

[0174] Please see e.g., the human HEMO sequence shown on FIG. 1C or 4B.

[0175] The amino acid sequence of the ectodomain of the HEMO protein may consist of 443-468 amino acids or 443-467 amino acids, more particularly of 460-467 amino acids or of 459-466 amino acids, or of 453-460 amino acids or of 443-450 amino acids, for example of 463 or of 462 or of 456 or of 446 amino acids.

[0176] The HEMO ectodomain may start at the first amino acid after the signal peptide (in N- to C-orientation). The HEMO ectodomain ends before the first amino acid of the transmembrane domain (in N- to C-orientation).

[0177] The amino acid sequence of ii. is more particularly chosen from among the CTQG sequence, the CTQR sequence and the CIQR sequence. More particularly, the amino acid sequence of ii. is the CTQG sequence.

[0178] The optional amino acid sequence of iii., i.e., of SEQ ID NO: 148, features the ImmunoSuppressive Domain [or ISD] of the HEMO protein and is generic for the Boreoeutheria. In the human HEMO protein, said sequence of SEQ ID NO: 148 (ISD) may consist of the sequence of SEQ ID NO: 7.

[0179] The amino acid sequence of iv. i.e., of SEQ ID NO: 149, features a CX6CC motif and is generic for the Boreoeutheria. In the human HEMO protein, said sequence of SEQ ID NO: 149 may consist of the sequence of SEQ ID NO: 410.

[0180] For example, the HEMO ectodomain may consists of a sequence chosen from among

a/ SEQ ID NO: 4 and 172-182 [human HEMO ectodomain; start positions 27, 25 or 26; stop positions 489, 488, 491 or 486],
b/ SEQ ID NO: 910-918 [human HEMO ectodomain; start positions 25, 26 or 27; stop positions 487, 490 or 492], and
c/ the sequences, which consist of 443-468 or 443-467 amino acids, and which are at least 76% identical to at least one of SEQ ID NO: 4 and 172-182 (over the entire length of said at least one of SEQ ID NO: 4 and 172-182 and 910-918).

[0181] The expression at least 76% identical encompasses at least 77%, at least 78%, at least 79%, at least 80%, at least 81%, at least 82%, at least 83%, at least 84%, at least 85%, at least 86%, at least 87%, at least 88% or at least 89% or at least 90% or at least 91% or at least 92% or at least 93% or at least 94% or at least 95% or at least 96% or at least 97% or at least 98% or at least 99% identical.

[0182] The sequences of b/ include the HEMO ectodomain of non-human Boreoeutheria. They may e.g., be chosen from among
[0183] the sequences of SEQ ID NO: 547-561 and
[0184] the sequences, which are fragments of at least one of the sequences of SEQ ID NO: 547-561, and which differ by at most 7 or 8 amino acids in length from said at least one of the sequences of SEQ ID NO: 547-561. The sequences of b/may e.g., be chosen from among the sequences of SEQ ID NO: 442-621.

[0185] For example, the (human) HEMO ectodomain may consists of a sequence chosen from among

d/ the sequences of SEQ ID NO: 178, 912 and 547-561, and
e/ the sequences, which are fragments of at least one of the sequences of SEQ ID NO: 172, 911 and 457-471, and which differ by at most 7 amino acids in length from said at least one of the sequences of SEQ ID NO: 178, 912 and 547-561- and

[0186] The sequences of d/ and e/ may e.g., be chosen from among the sequences of SEQ ID NO: 4, 172-182 and 442-621.

[0187] The sequence, which extends from the first amino acid of the signal peptide to the last amino acid of the ectodomain of the (human) HEMO protein (in N- to C-orientation) may e.g., be a sequence chosen from among the sequences of SEQ ID NO: 438-441 (start position=1; end position=489, 488, 491 or 486).

### HEMO Transmembrane Domain

[0188] The transmembrane domain of the HEMO protein extends from the amino acid, which is immediately after the last amino acid of the ectodomain, to the amino acid which immediately precedes the first amino acid of the intracellular domain (in N- to C-orientation).

[0189] The amino acid sequence of the transmembrane domain of the HEMO protein may consist of 17 or 18-27 amino acids. It may comprise the sequence of SEQ ID NO: 421

[0190] More particularly, the amino acid sequence of said transmembrane domain may consist of 17 or 18-27 amino acids, and may comprise or consist of a sequence chosen from among the sequences of SEQ ID NO: 151, 407-409 and 419-426.

[0191] More particularly, the amino acid sequence of the transmembrane domain of the (human) HEMO protein may consist of 17 or 18-27 amino acids, and may comprise the sequence of SEQ ID NO: 432.

[0192] More particularly, the amino acid sequence of the transmembrane domain of the (human) HEMO protein may consist of 17 or 18-27 amino acids, and may comprise or consist of a sequence chosen from among the sequences of SEQ ID NO: 5 and 427-437.

[0193] More particularly, the amino acid sequence of the transmembrane domain of the (human) HEMO protein consists of a sequence chosen from among the sequences of SEQ ID NO: 5 and 427-437.

### HEMO Intracellular Domain

[0194] The intracellular domain of the HEMO protein extends from the amino acid, which is immediately after the last amino acid of the transmembrane, to the last amino acid of the HEMO protein (in N- to C-orientation).

[0195] The amino acid sequence of the intracellular domain of the HEMO protein may consist of 20-54 amino acids, e.g., of 30-54, 40-54 or 50-54 amino acids. It may comprise the sequence of SEQ ID NO: 413. More particularly, the amino acid sequence of the intracellular domain of the HEMO protein may consist of a sequence chosen from among the sequences of SEQ ID NO: 411-413.

[0196] For example, the amino acid sequence of the intracellular domain of the HEMO protein may consist of 50-54 amino acids and may comprise the sequence of SEQ ID NO: 416. More particularly, the amino acid sequence of the intracellular domain of the HEMO protein may consist of a sequence chosen from among the sequences of SEQ ID NO: 414-416.

[0197] For example, the amino acid sequence of the intracellular domain of the (human) HEMO protein may consist of 50-54 amino acids and may comprise the sequence of SEQ ID NO: 418. More particularly, the amino acid sequence of the intracellular domain of the (human) HEMO protein may consist of a sequence chosen from among the sequences of SEQ ID NO: 6, 417 and 418.

### HEMO Shedding

[0198] The inventors demonstrate that the HEMO protein is shed in its ectodomain.

[0199] The inventors have identified shedding (or cleavage) sites in the HEMO ectodomain, more particularly at least three different shedding sites in the HEMO ectodomain.

[0200] These shedding sites can be located in the region, which in the human HEMO protein of SEQ ID NO: 1 extends from amino acid position 380 to amino acid position 480, i.e., in the HEMO polypeptide of SEQ ID NO: 150.

[0201] More particularly, at least one of said shedding sites can be located in the region, which in the human HEMO protein of SEQ ID NO: 1 extends from amino acid position 380 to amino acid position 420, or from amino acid position 421 to amino acid position 449, or from amino acid position 450 to amino acid position 480.

[0202] More particularly, at least one of said shedding sites can be located in the region, which in the human HEMO protein of SEQ ID NO: 1 extends from amino acid position 421 to amino acid position 449; wherein said shedding sites can be located between amino acid positions 421 and 422, or 422 and 423, or 423 and 424, or 424 and 425, or 425 and 426, or 426 and 427, or 427 and 428, or 428 and 429, or 429 and 430, or 430 and 431, or 431 and 432, or 432 and 433, or 433 and 434, or 434 and 435, or 435 and 436, or 436 and 437, or 437 and 438, or 438 and 439, or 439 and 440, or 440 and 441, or 441 and 442, or 442 and 443, or 443 and 444, or 444 and 445, or 445 and 446, or 446 and 447, or 447 and 448, or 448 and 449.

[0203] More particularly, at least one of said shedding sites can be located in the region, which in the human HEMO protein of SEQ ID NO: 1 extends from amino acid position 428 to amino acid position 438, i.e., in the HEMO polypeptide of SEQ ID NO: 623. It is the main shedding site of the HEMO protein, and locates in the immunosuppressive domain of the HEMO ectodomain.

[0204] For example, at least one of said shedding sites can be located between amino acid positions 432 and 433, or 433 and 434 (computed by reference to the human HEMO protein of SEQ ID NO: 1; cf. FIG. 11A-11B or 12A-12C to identify the corresponding amino positions in the non-human HEMO proteins).

[0205] Other shedding sites may locate upstream or downstream said immunosuppressive domain (in N- to C-orientation).

[0206] By reference to the human HEMO protein sequence of SEQ ID NO: 1, a downstream shedding site may locate between two (different) amino acid positions chosen from amino acid positions 450-480 (i.e., it may locate in SEQ ID NO: 624), for example between amino acid positions 472 and 473.

[0207] By reference to the human HEMO protein sequence of SEQ ID NO: 1, an upstream shedding site may locate between two (different) amino acid positions chosen from amino acid positions 380-420 (i.e., it may locate in SEQ ID NO: 622), for example between positions 406 and 407.

[0208] The shedding of the HEMO ectodomain results in the release of soluble fragments, which are N-terminal fragments of the HEMO ectodomain.

[0209] The C-terminal fragment that results from the cleavage of a (soluble) N-terminal fragment is retained at the cell (or part of cells, e.g. exosomes) surface, more particularly at the surface of placental cells (or part of placental cells), of stem cells (or part of stem cells), or of (some) tumor cells (or part of (some) tumor cells).

[0210] The inventors notably demonstrate that the shedding of the HEMO protein may be indicative (or may be a marker) of pluripotency and/or of a tumorigenic nature.

### Soluble N-Terminal Fragments of HEMO Ectodomain (Produced by Shedding of the HEMO Protein)

[0211] The expression “polypeptide in soluble form” (or similar expression) is intended in accordance with its ordinary meaning in the art. The expression generally refers to an acellular or cell-free polypeptide, i.e., which is not contained in or linked to a cell. The expression refers more particularly to a polypeptide which is not membranar, not transmembranar, and not cytosolic.

[0212] The application thus relates to a polypeptide, the amino acid sequence of which is the sequence of a fragment, more particularly the sequence of a N-terminal fragment, of the ectodomain of a retroviral Env protein, wherein said retroviral Env protein is the HEMO protein as above-defined.

[0213] Said HEMO protein can e.g., be defined as a retroviral Env protein, which is endogenous to a Boreoeutheria, wherein the amino acid sequence of the HEMO protein may e.g., be

a. the sequence of SEQ ID NO: 1, or the amino acid sequence which is at least 59% identical to SEQ ID NO: 1, more particularly the amino acid sequence which is at least 60%, 65%, 70%, 75%, 80%, 81%, 82%, 83%, 84%, 85%, 86%, 87%, 88%, 89%, 90%, 91%, 92%, 93%, 94%, 95%, 96%, 97%, 98% or 99% identical to SEQ ID NO: 1, or
b. a sequence, which consists of 517-578 amino acids, and which is at least 78% identical to SEQ ID NO: 1 over the entire length of SEQ ID NO: 1.

[0214] The amino acid sequence of the ectodomain of said retroviral Env protein is as above-defined, e.g., it may consist of a sequence of 443-467 amino acids, which may comprise, in N-term to C-term orientation,

i. a CWLC amino acid sequence,
ii. an amino acid sequence chosen from among the CTQG sequence, the CTQR sequence, the CIQR sequence, the RTQR sequence and the RTKR sequence,
iii. an optional amino acid sequence of SEQ ID NO: 148 (which features the ISD of the HEMO protein), and
iv. an amino acid sequence of SEQ ID NO: 149.

[0215] The sequence of the fragment of said ectodomain consists of a number of amino acids lower than said ectodomain, said lower number being more particularly chosen from among 344-457, or 352-457, or 354-456, or 374-446, more particularly from among 344-373, or 354-373, or 406-409, or 374-396, or 424-446, or 447-456, or 447-457.

[0216] The sequence of the fragment of said ectodomain may comprise said sequence of i. and said sequence of ii.

[0217] The application uses the HEMO protein sequences of human as a reference and comprises the HEMO protein sequences of chimpanzee (CPZ), gorilla (GOR), orangutan (ORA), gibbon (GIB), macaque (MAC), baboon (BAB), African Green Monkey (AGM), Colobus (Angolensis palliates) (COL), Langur (LAN), Marmoset (MAR), Rhinopithecus (roxellana) (RHI), Squirrel monkey (SQM), Spider monkey (SPI), Saki monkey (SAK), and cat (CAT), wherein corresponding the different motifs and positions of the ectodomain herein defined are as follows:

TABLE 1
Equivalent positions and motifs on Boreoeutheria HEMO proteins as compared to Human HEMO protein.

| | | | | | | | | | Ectodomain | |
|---|---|---|---|---|---|---|---|---|---|---|
| HEMO protein | | | Motifs (from aa to aa) | | | | Shedding | | | End |
| SEQ ID NO | Species | size (aa) | CWLC | Furin motif | ISU | CXX6CC | Start | End | Start | (from aa to aa) |
| 1 | Human | 563 | 44-47 | 352-355 | 420-436 | 437-445 | 380 | 480 | 25, 26 or 27 | 486-492 |
| 129 | CPZ | 563 | 44-47 | 352-355 | 420-436 | 437-445 | 380 | 480 | 25, 26 or 27 | 486-492 |
| 130 | GOR | 563 | 44-47 | 352-355 | 420-436 | 437-445 | 380 | 480 | 25, 26 or 27 | 486-492 |
| 131 | OO | 563 | 44-47 | 352-355 | 420-436 | 437-445 | 380 | 480 | 25, 26 or 27 | 486-492 |
| 132 | GIB | 563 | 44-47 | 352-355 | 420-436 | 437-445 | 380 | 480 | 25, 26 or 27 | 486-492 |
| 133 | MAC | 563 | 44-47 | 352-355 | 420-436 | 437-445 | 380 | 480 | 25, 26 or 27 | 486-492 |
| 134 | BAB | 563 | 44-47 | 352-355 | 420-436 | 437-445 | 380 | 480 | 25, 26 or 27 | 486-492 |
| 135 | AGM | 562 | 44-47 | 351-354 | 419-435 | 436-444 | 379 | 479 | 25, 26 or 27 | 485-491 |
| 136 | COL | 563 | 44-47 | 352-355 | 420-436 | 437-445 | 380 | 480 | 25, 26 or 27 | 486-492 |
| 137 | LAN | 563 | 44-47 | 352-355 | 420-436 | 437-445 | 380 | 480 | 25, 26 or 27 | 486-492 |
| 138 | RHI | 562 | 44-47 | 352-355 | 419-435 | 436-444 | 380 | 479 | 25, 26 or 27 | 485-491 |
| 139 | MAR | 527 | 44-47 | 352-355 | 420-436 | 437-445 | 380 | 476 | 25, 26 or 27 | 479-485 |
| 140 | SQM | 527 | 44-47 | 352-355 | 420-436 | 437-445 | 380 | 476 | 25, 26 or 27 | 479-485 |
| 141 | SPI | 517 | 44-47 | 342-345 | 410-426 | 427-435 | 370 | 466 | 25, 26 or 27 | 469-475 |
| 142 | SAK | 527 | 44-47 | 352-355 | 420-436 | 437-445 | 380 | 476 | 25, 26 or 27 | 479-485 |
| 143 | CAT | 578 | 44-47 | 352-355 | 418-433 | 434-442 | 378 | 479 | 24, 25, 26 or 27 | 485-491 |

[0218] The general aspect of the invention thus relates to a polypeptide consisting of a N-terminal fragment of the ectodomain of an endogenous Boreoeutheria retroviral Env protein,
[0219] a. wherein said retroviral Env protein is
   [0220] the amino acid sequence of SEQ ID NO: 1; or
   [0221] the amino acid sequence which is at least 59% identical to SEQ ID NO: 1, more particularly the amino acid sequence which is at least 60%, 65%, 70%, 75%, 80%, 81%, 82%, 83%, 84%, 85%, 86%, 87%, 88%, 89%, 90%, 91%, 92%, 93%, 94%, 95%, 96%, 97%, 98% or 99% identical to SEQ ID NO: 1; or
   [0222] a sequence chosen from among the sequences of SEQ ID NOs: 129-143,
[0223] b. wherein said ectodomain, without its signal peptide or fragment thereof, of said retroviral Env protein consists of:
   [0224] 443-468 or 443-467 amino acids of said sequences which more particularly comprise in N-term to C-term orientation
      [0225] i. a CWLC amino acid sequence,
      [0226] ii. an amino acid sequence chosen from among the CTQG sequence, the CTQR sequence, the CIQR sequence, the RTQR sequence and the RTKR sequence, and
      [0227] iv. an amino acid sequence of SEQ ID NO: 149;
wherein the ectodomain of said retroviral Env protein consists more particularly of a sequence chosen from among the sequences of SEQ ID NOs: 178, 912 and 547-561, and the sequences, which are the fragments of at least one of the sequences of SEQ ID NOs: 172, 911 and 457-471, and which differ by at most 7 or 8 amino acids in length of at least one of the sequences of SEQ ID NOs: 178, 912 and 547-561,
[0228] wherein the sequence of said N-terminal fragment:
   [0229] consists of a number of amino acids lower than said ectodomain, said lower number being chosen from among 344-457 or 374-446,
   [0230] starts at the N-terminal extremity of said ectodomain; and
   [0231] comprises said sequence of b.i. and said sequence of b.ii.

[0232] According to a particular embodiment, the invention relates to a polypeptide consisting of a N-terminal fragment of the ectodomain of an endogenous Boreoeutheria (e.g. Human, CPZ, GOR, ORA, GIB, MAC, BAB, AGM, COL, LAN, MAR, RHI, SQM, SPI, SAK) retroviral Env protein as defined above,
[0233] a. wherein said retroviral Env protein is
   [0234] the amino acid sequence of SEQ ID NO: 1; or
   [0235] the amino acid sequence which is at least 59% identical to SEQ ID NO: 1, more particularly the amino acid sequence which is at least 60%, 65%, 70%, 75%, 80%, 81%, 82%, 83%, 84%, 85%, 86%, 87%, 88%, 89%, 90%, 91%, 92%, 93%, 94%, 95%, 96%, 97%, 98% or 99% identical to SEQ ID NO: 1; or
   [0236] a sequence chosen from among the sequences of SEQ ID NOs: 129-142,
[0237] b. wherein said ectodomain, without its signal peptide or fragment thereof, of said retroviral Env protein consists of:
   [0238] 443-468 or 443-467 amino acids of said sequences which more particularly comprise in N-term to C-term orientation
      [0239] i. a CWLC amino acid sequence,
      [0240] ii. an amino acid sequence chosen from among the CTQG sequence, the CTQR sequence, the CIQR sequence and the RTKR sequence,
      [0241] iii. an amino acid sequence of SEQ ID NO: 148, and
      [0242] iv. an amino acid sequence of SEQ ID NO: 149;
wherein the ectodomain of said retroviral Env protein consists more particularly of a sequence chosen from among the sequences of SEQ ID NOs: 178, 912 and 547-560, and the sequences, which are the fragments of at least one of the sequences of SEQ ID NOs: 172, 911 and 457-470, and which differ by at most 7 or 8 amino acids in length of at least one of the sequences of SEQ ID NOs: 178, 912 and 547-560,
[0243] wherein the sequence of said N-terminal fragment:
   [0244] consists of a number of amino acids lower than said ectodomain, said lower number being chosen from among 344-457 or 374-446,
   [0245] starts at the N-terminal extremity of said ectodomain; and
   [0246] comprises said sequence of b.i. and said sequence of b.ii.

[0247] More particularly, the above mention peptides are N-terminal fragments of the ectodomain of an endogenous Boreoeutheria retroviral Env protein as defined above, wherein the sequence of said N-terminal fragments consist of a number of amino acids lower than said ectodomain, said lower number being chosen from among 354-456 or 374-446.

[0248] According to another particular embodiment, the invention relates to a polypeptide consisting of a N-terminal fragment of the ectodomain of an endogenous Boreoeutheria (e.g. Human, CPZ, GOR, ORA, GIB, MAC, BAB, AGM, COL, LAN, MAR, RHI, SQM, SPI, SAK) retroviral Env protein as defined above, wherein
[0249] a. the C-terminal extremity of said N-terminal fragment is located from amino acid at position 380 to amino acid at position 480 of the sequences SEQ ID NOs: 1, 129-134 and 136-137 and before the N-terminal extremity of the transmembrane domain of the sequences SEQ ID NOs: 1, 129-134 and 136-137 at a location of 6 to 112 amino acids upstream the N-terminal extremity of the transmembrane domain of the sequences SEQ ID NOs: 1, 129-134 and 136-137; or
[0250] b. the C-terminal extremity of said N-terminal fragment is located from amino acid at position 379 to amino acid at position 479 of the sequence SEQ ID NO: 135 and before the N-terminal extremity of the transmembrane domain of the sequence SEQ ID NO: 135 at a location of 6 to 112 amino acids upstream the N-terminal extremity of the transmembrane domain of the sequence SEQ ID NO: 135; or
[0251] c. the C-terminal extremity of said N-terminal fragment is located from amino acid at position 380 to amino acid at position 479 of the sequence SEQ ID NO: 138 and before the N-terminal extremity of the transmembrane domain of the sequence SEQ ID NO: 138 at a location of 6 to 111 amino acids upstream the N-terminal extremity of the transmembrane domain of the sequence SEQ ID NO: 138; or
[0252] d. the C-terminal extremity of said N-terminal fragment is located from amino acid at position 380 to amino acid at position 476 of the sequences SEQ ID NOs: 139-140 and 142 and before the N-terminal extremity of the transmembrane domain of the sequences SEQ ID NOs: 139-140 and 142 at a location of 3 to 105 amino acids upstream the N-terminal extremity of the transmembrane domain of the sequences SEQ ID NOs: 139-140 and 142; or
[0253] e. the C-terminal extremity of said N-terminal fragment is located from amino acid at position 370 to amino acid at position 466 of the sequence SEQ ID NO: 141 and before the N-terminal extremity of the transmembrane domain of the sequence SEQ ID NO: 141 at a location of 3 to 105 amino acids upstream the N-terminal extremity of the transmembrane domain of the sequence SEQ ID NO: 141.

[0254] The expression “before the N-terminal extremity of the transmembrane domain of the sequences SEQ ID NOs: 1, 129-134 and 136-137 at a location of 6 to 112 amino acids upstream the N-terminal extremity of the transmembrane domain of the sequences SEQ ID NOs: 1, 129-134 and 136-137” corresponds to the fact that, e.g.,

if the human HEMO ectodomain corresponds to positions 27-492 of the sequence SEQ ID NO:1, the N-terminal extremity of the transmembrane domain is the amino acid 493 of the sequence SEQ ID NO:1;
in consequence, if the N-terminal fragment of the human HEMO ectodomain has a size of 354 amino acids, said N-terminal fragment of the human HEMO ectodomain goes from amino acid 27 to amino acid 380 of the sequence SEQ ID NO:1, the amino acid at position 380 being at a location of 112 amino acids upstream the amino acid at position 493 which is the N-terminal extremity of the transmembrane domain of the sequence SEQ ID NO:1;
and if the human HEMO ectodomain corresponds to positions 25-486 of the sequence SEQ ID NO:1, the N-terminal extremity of the transmembrane domain is the amino acid 487 of the sequence SEQ ID NO:1;
in consequence, if the N-terminal fragment of the human HEMO ectodomain has a size of 456 amino acids, said N-terminal fragment of the human HEMO ectodomain goes from amino acid 25 to amino acid 480 of the sequence SEQ ID NO:1, the amino acid at position 480 being at a location of 6 amino acids upstream the amino acid at position 487 which is the N-terminal extremity of the transmembrane domain of the sequence SEQ ID NO:1

[0255] According to another particular embodiment, the invention relates to a polypeptide consisting of a N-terminal fragment of the ectodomain of an endogenous human retroviral Env protein as defined above,
[0256] a. wherein said human retroviral Env protein is
   [0257] the amino acid sequence of SEQ ID NO: 1; or
   [0258] the amino acid sequence which is at least 80% identical to SEQ ID NO: 1, more particularly the amino acid sequence which is at least 81%, 82%, 83%, 84%, 85%, 86%, 87%, 88%, 89%, 90%, 91%, 92%, 93%, 94%, 95%, 96%, 97%, 98% or 99% identical to SEQ ID NO: 1,
[0259] b. wherein said ectodomain, without its signal peptide or fragment thereof, of said retroviral Env protein consists of:
   [0260] 443-468 or 443-467 amino acids of said sequences which more particularly comprise in N-term to C-term orientation
      [0261] i. a CWLC amino acid sequence,
      [0262] ii. an amino acid sequence chosen from among the CTQG sequence, the CTQR sequence, the CIQR sequence and the RTKR sequence,
      [0263] iii. an amino acid sequence of SEQ ID NO: 148, and
      [0264] iv. an amino acid sequence of SEQ ID NO: 149;
wherein the ectodomain of said human retroviral Env protein consists more particularly of:
   [0265] a sequence chosen from among the sequences of SEQ ID NOs: 178 and 912 and the sequences, which are the fragments of at least one of the sequences of SEQ ID NOs: 172 and 911, and which differ by at most 7 or 8 amino acids in length of at least one of the sequences of SEQ ID NO: 178 and 912,
[0266] wherein the sequence of said N-terminal fragment:
   [0267] consists of a number of amino acids lower than said ectodomain, said lower number being chosen from among 354-456 or 374-446,
   [0268] starts at the N-terminal extremity of said ectodomain;
   [0269] comprises said sequence of b.i. and said sequence of b.ii.; and
   [0270] the C-terminal extremity of said N-terminal fragment is located from amino acid at position 380 to amino acid at position 480 of the sequence SEQ ID NO: 1 and before the N-terminal extremity of the transmembrane domain of the sequence SEQ ID NO: 1 at a location of 6 to 112 amino acids upstream the N-terminal extremity of the transmembrane domain of the sequence SEQ ID NO: 1.

[0271] The sequence of said (soluble) ectodomain fragment may not comprise the full-length sequence of iii., but may comprise a fragment of said sequence of iii. It is notably the case when the shedding site is the main shedding site as described above. For example, the sequence of the (soluble) ectodomain fragment may comprise or consist of a sequence chosen from among the sequences of SEQ ID NO: 9-10, 183-184 and 185-186.

[0272] The sequence of said (soluble) ectodomain fragment may not comprise the sequence of iii., and may not comprise any fragment of the sequence of iii. It is notably the case when the shedding site is a secondary (upstream) shedding site as described above. For example, the sequence of said (soluble) ectodomain fragment may comprise or consist of a sequence chosen from among the sequences of SEQ ID NO: 13-33, 670-689, 195-215, 690-709, 216-236 and 710-729.

[0273] The sequence of said (soluble) ectodomain fragment may comprise the sequence of iii. It is notably the case when the shedding site is a secondary (downstream) shedding site as described above. For example, the sequence of said (soluble) ectodomain fragment may comprise or consist of a sequence chosen from among the sequences of SEQ ID NO: 55-75, 830-839, 300-320, 840-849, 321-341 and 850-859.

[0274] More particularly, the invention relates to a polypeptide as defined above,
[0275] a. wherein the sequence of the N-terminal fragment of said ectodomain does not comprise the full-length sequence of b.iii., but comprises a fragment of said sequence of b.iii.;
[0276] b. more particularly wherein the sequence of the N-terminal fragment of said ectodomain comprises or consists of a sequence chosen from among the sequences of SEQ ID NOs: 9-10, 183-184 and 185-186.

[0277] More particularly, the invention relates to polypeptide as defined above,
[0278] a. wherein the sequence of the N-terminal fragment of said ectodomain does not comprise the sequence of claim 2.b.iii., and does not comprise any fragment of the sequence of b.iii.,
   [0279] more particularly wherein the sequence of the N-terminal fragment of said ectodomain comprises or consists of a sequence chosen from among the sequences of SEQ ID NO: 13-33, 670-689, 195-215, 690-709, 216-236 and 710-729;
[0280] or
[0281] b. wherein the sequence of the N-terminal fragment of said ectodomain comprises the sequence of b.iii.,
   [0282] more particularly wherein the sequence of the N-terminal fragment of said ectodomain comprises or consists of a sequence chosen from among the sequences of SEQ ID NOs: 55-75, 830-839, 300-320, 840-849, 321-341 and 850-859.

[0283] More particularly, the invention relates to polypeptide as defined above,
[0284] a. wherein the sequence of the N-terminal fragment of said ectodomain starts at the N-terminal extremity of said ectodomain, said N-terminal extremity of said ectodomain corresponding to amino acid at position 25 of the sequence SEQ ID NO: 1, and
   [0285] wherein the C-terminal extremity of said N-terminal fragment corresponds to amino acid at position 421, 422, 423, 424, 425, 426, 427, 428, 429, 430, 431, 432, 433, 434, 435, 436, 437, 438, 439, 440, 441, 442, 443, 444, 445, 445, 446, 447, 448 or 449 of the sequence SEQ ID NO: 1; or
[0286] b. wherein the sequence of the N-terminal fragment of said ectodomain starts at the N-terminal extremity of said ectodomain, said N-terminal extremity of said ectodomain corresponding to amino acid at position 26 of the sequence SEQ ID NO: 1, and
   [0287] wherein the C-terminal extremity of said N-terminal fragment corresponds to amino acid at position 421, 422, 423, 424, 425, 426, 427, 428, 429, 430, 431, 432, 433, 434, 435, 436, 437, 438, 439, 440, 441, 442, 443, 444, 445, 445, 446, 447, 448 or 449 of the sequence SEQ ID NO: 1; or
[0288] c. wherein the sequence of the N-terminal fragment of said ectodomain starts at the N-terminal extremity of said ectodomain, said N-terminal extremity of said ectodomain corresponding to amino acid at position 27 of the sequence SEQ ID NO: 1, and
   [0289] wherein the C-terminal extremity of said N-terminal fragment corresponds to amino acid at position 421, 422, 423, 424, 425, 426, 427, 428, 429, 430, 431, 432, 433, 434, 435, 436, 437, 438, 439, 440, 441, 442, 443, 444, 445, 445, 446, 447, 448 or 449 of the sequence SEQ ID NO: 1.

[0290] More particularly, the invention relates to polypeptide as defined above, wherein the sequence of the N-terminal fragment of said ectodomain comprises or consists of a sequence chosen from among the sequences of SEQ ID NOs: 9-10, 184-186 and 991-1071.

[0291] According to a particular embodiment, the invention relates to a polypeptide consisting of a N-terminal fragment of the ectodomain of an endogenous cat retroviral Env protein as defined above,
[0292] a. wherein said retroviral Env protein is
   [0293] the amino acid sequence of SEQ ID NO: 143; or
   [0294] the amino acid sequence which is at least 80% identical to SEQ ID NO: 143, more particularly the amino acid sequence which is at least 81%, 82%, 83%, 84%, 85%, 86%, 87%, 88%, 89%, 90%, 91%, 92%, 93%, 94%, 95%, 96%, 97%, 98% or 99% identical to SEQ ID NO: 143,
[0295] b. wherein said ectodomain, without its signal peptide or fragment thereof, of said retroviral Env protein consists of 443-468 or 443-467 amino acids of said sequences which more particularly comprise in N-term to C-term orientation
   [0296] i. a CWLC amino acid sequence,
   [0297] ii. a RTQR sequence, and
   [0298] iv. an amino acid sequence of SEQ ID NO: 149;
wherein the ectodomain of said retroviral Env protein consists more particularly of the sequences of SEQ ID NOs: 561 and 951, and the sequences, which are the fragments of the sequences of SEQ ID NOs: 471 and 949, and which differ by at most 7 or 8 amino acids in length of at least one of the sequences of SEQ ID NOs: 561 and 951,
[0299] wherein the sequence of said N-terminal fragment:
   [0300] consists of a number of amino acids lower than said ectodomain, said lower number being chosen from among 352-457 or 374-446;
   [0301] starts at the N-terminal extremity of said ectodomain; and
   [0302] comprises said sequence of b.i. and said sequence of b.ii.

[0303] More particularly, the invention relates to polypeptide as defined above having a percentage of identity of at least 90%, 91%, 92%, 93%, 94%, 95%, 96%, 97%, 98% or 99% with said polypeptide herein defined.

[0304] In particular, the above mentioned peptides of the invention are under a lyophilized form or a concentrated form (e.g. from 0.001 to 10 000 nM, or from 0.01 to 10 000 nM, or from 0.001 to 1 000 nM, or from 0.01 to 1 000 nM, or from 0.1 to 1 000 nM, or from 0.1 to 100 nM, or from 0.1 to 10 nM, or from 10 to 100 nM, or from 10 to 1 000 nM, or from 100 to 1 000 nM, or from 1 000 to 10 000 nM or from 5 000 to 10 000 nM) in any physiologically and acceptable carrier.

[0305] Said (soluble) ectodomain fragment may comprise the first amino acid of the HEMO ectodomain (in N-term to C-term orientation).

[0306] Said (soluble) ectodomain fragment may be herein referred to as the soluble polypeptide, or the N-terminal fragment, or the soluble N-terminal ectodomain fragment.

(Sub-)Fragments of the soluble N-Terminal Ectodomain Fragments, which May be Useful e.g., for Antibody Production

[0307] The application also relates to (sub-)fragments of the above-described (soluble) ectodomain fragments. These (sub-)fragments notably encompass (sub-)fragments, which are useful for antibody production, more particularly for monoclonal antibody production (cf. example 2 below).

[0308] The application thus relates to a (sub-)fragment of said (soluble) N-terminal fragments of HEMO ectodomain (soluble N-terminal fragments produced by shedding of the HEMO protein), wherein said (sub-)fragment comprises:
[0309] at least 10 amino acids, more particularly at least 50 amino acids, 100 amino acids, more particularly at least 150 amino acids, more particularly at least 160 amino acids, more particularly at least 164 amino acids; and/or
[0310] less than 400 amino acids, more particularly less than 300 amino acids, more particularly less than 250 amino acids, more particularly less than 200 amino acids.

[0311] For example, said (sub-)fragment may comprise at least 100 amino acids and less than 200 amino acids, for example 164-199 amino acids, for example 164 amino acids.

[0312] For example, said (sub-)fragment may comprise the sequence of SEQ ID NO: 8.

[0313] Said (sub-)fragment advantageously comprise at least one antigen or epitope. Said (sub-)fragment may be immunogenic e.g., when administered to a mouse, for example by systemic administration.

C-Terminal Fragments of HEMO Ectodomain (Resulting from the Shedding of One of Said N-Terminal Ectodomain Fragments), and Cells, which Express Said C-Terminal Fragment at their Surface

[0314] The application also relates to the (C-terminal) fragments of HEMO ectodomain or of HEMO protein, which result from the shedding of one of said soluble N-terminal ectodomain fragments.

[0315] The application also relates to cells (or part of cells, e.g. exosomes), which express (or onto which has been retained) such a (C-terminal) fragment of HEMO ectodomain or of HEMO protein.

[0316] The application thus relates to a polypeptide, the amino acid sequence of which is the sequence of a fragment of the HEMO protein (as defined above), wherein said fragment comprises a C-terminal fragment of the ectodomain of the HEMO protein,

wherein said fragment of retroviral Env protein does not comprise the full-length amino acid sequence of said ectodomain, more particularly wherein said C-terminal fragment comprises the C-terminal end of said ectodomain without comprising the N-terminal end of said ectodomain, and
wherein said C-terminal fragment of ectodomain is the C-terminal fragment, which remains after shedding (or cleavage) of one of said soluble N-terminal ectodomain fragments.

[0317] The sequence of said polypeptide may comprise (or the sequence of C-terminal fragment of ectodomain may consist of):

a sequence chosen from among SEQ ID NO: 11-12, 189-190, 191-192 and 193-194; or
a sequence chosen from among SEQ ID NO: 34-54, 730-749, 237-257, 750-769, 258-278, 770-789, 279-299 and 790-809; or
a sequence chosen from among SEQ ID NO: 76-96, 860-869, 342-362, 870-, 879, 363-383, 880-889, 384-404 and 890-899.

[0318] For example, the sequence of said polypeptide may e.g., be chosen from among the sequences of SEQ ID NO: 625-626, 627-647, 810-829, 648-668 and 900-909.

[0319] Said polypeptide may be herein referred to as the C-terminal protein fragment.

[0320] The application also relates to an (isolated) cell, more particularly a naturally-occurring or genetically engineered cell, which expresses said C-terminal protein fragment, wherein a portion of the C-terminal protein fragment is expressed at the surface of said cell, and wherein said surface-expressed portion comprises the C-terminal fragment of ectodomain which is comprised in said C-terminal protein fragment.

[0321] The application also relates to a polypeptide, the amino acid sequence of which is the sequence of a C-terminal fragment of the ectodomain of the HEMO protein,

wherein said HEMO protein and said ectodomain are as herein defined, and
wherein said C-terminal fragment is the C-terminal fragment of said ectodomain, which remains after shedding (or cleavage) of one of said soluble N-terminal ectodomain fragments from said ectodomain.

[0322] Said polypeptide may consist of:

a sequence chosen from among SEQ ID NO: 11-12, 189-190, 191-192 and 193-194; or
a sequence chosen from among SEQ ID NO: 34-54, 730-749, 237-257, 750-769, 258-278, 770-789, 279-299 and 790-809; or
a sequence chosen from among SEQ ID NO: 76-96, 860-869, 342-362, 870-, 879, 363-383, 880-889, 384-404 and 890-899.

[0323] Said polypeptide may be referred to as C-terminal ectodomain fragment.

[0324] The application also relates to a polypeptide, the sequence of which, in N-term to C-term orientation, starts with the sequence of a C-terminal ectodomain fragment (as described above), and wherein the C-terminal end of sequence of C-terminal ectodomain fragment is (directly) linked to a transmembrane domain of the HEMO protein, or to a transmembrane domain and to an intracellular domain of the HEMO protein, wherein said HEMO protein is as herein defined.

[0325] The application also relates to an (isolated) cell, more particularly a naturally-occurring or genetically engineered cell, which expresses said C-terminal ectodomain fragment, wherein said C-terminal ectodomain fragment is expressed at the surface of said cell.

[0326] Said cell may be a naturally-occurring (but isolated) cell, or a genetically engineered cell.

[0327] Said cell may be a Boreoeutheria cell, more particularly a human cell.

[0328] Said cell may be a placental cell (e.g., a trophoblast), a stem cell, a tumor cell, or a tumor stem cell. Said placental cell may e.g., be a trophoblast cell, more particularly a villous cytotrophoblast, an extravillous cytotrophoblast or a chorionic membrane trophoblast.

[0329] Said tumor cell may e.g., be an ovarian tumor, an uterine tumor (more particularly an endometrial tumor, a cervical tumor, a gestational tumor (including placental tumor, e.g., choriocarcinoma)), a breast tumor, a lung tumor, a stomach tumor, a colon tumor, a liver tumor, a kidney tumor, a prostate tumor, an urothelial tumor, a germ cell tumor, a brain tumor, a head and neck tumor, a pancreatic tumor, a thyroid tumor, a thymus tumor, a skin tumor, a bone tumor or a bone marrow tumor. As urothelial tumors encompass carcinomas of the bladder, ureters and renal pelvis, said tumor may also be an urothelial tumor including a bladder tumor, an ureter tumor or a renal pelvis tumor.

[0330] According to a particular embodiment, the invention relates to a polypeptide consisting of a fragment of the ectodomain of an endogenous Boreoeutheria retroviral Env protein, wherein said fragment comprises a C-terminal fragment of the ectodomain of said retroviral Env protein,
[0331] a. wherein said retroviral Env protein and said ectodomain are as herein defined,
[0332] b. wherein said C-terminal fragment comprises the C-terminal end of said ectodomain without comprising the N-terminal end of said ectodomain,
[0333] c. wherein said C-terminal fragment of ectodomain is the C-terminal fragment, which remains after cleavage of the previously defined polypeptide from said ectodomain, more particularly wherein the sequence of said C-terminal fragment of ectodomain consists of a sequence chosen from among SEQ ID NOs: 11-12 and 189-194, or from among SEQ ID NOs: 34-54, 237-299 and 730-809, or from among SEQ ID NOs: 76-96, 342-404 and 860-899.

[0334] More particularly, the invention relates to polypeptide as defined above having a percentage of identity of at least 90%, 91%, 92%, 93%, 94%, 95%, 96%, 97%, 98% or 99% with said polypeptide herein defined.

(Sub-)Fragments of the C-Terminal Fragments of HEMO Ectodomain (Resulting from the Shedding of One of Said N-Terminal Ectodomain Fragments), which May be Useful e.g., for Antibody Production

[0335] The application also relates to (sub-)fragments of the above-described C-terminal fragments of HEMO ectodomain (which are retained on the cell surface after shedding of the soluble N-terminal fragments). These (sub-)fragments notably encompass (sub-)fragments, which are useful for antibody production, more particularly for monoclonal antibody production (cf. example 3 below).

[0336] The application thus relates to a (sub-)fragment of said C-terminal fragments of HEMO ectodomain, wherein said (sub-)fragment comprises:
[0337] at least 10 amino acids, more particularly at least 15, 16 or 17 amino acids; and/or
[0338] less than 200 amino acids, more particularly less than 30 amino acids.

[0339] Said (sub-)fragment advantageously comprise at least one antigen or epitope. Said (sub-)fragment may be immunogenic e.g., when administered to a mouse, for example by systemic administration.

Products or Uses, which Comprise or Derive from a Polypeptide, Polypeptide (Sub-)Fragment or Cell of the Application

[0340] The application also relates to products or uses, which comprise, involves or directly derive from said soluble N-terminal ectodomain fragments, said (sub-)fragments of (soluble) ectodomain fragments, said C-terminal protein fragments, said C-terminal ectodomain fragments and said cells.

[0341] More particularly, the application relates to said soluble N-terminal ectodomain fragments, said C-terminal protein fragments, said C-terminal ectodomain fragments and said cells for use in diagnosis, e.g., in the diagnostic of a tumor, in the diagnostic of a placentation defect, or in the diagnostic of a defect in the protection of a fetus against microbial (more particularly viral) infection in a pregnant Boreoeutheria; or therapy, e.g., in the treatment of a tumor, in the treatment of a placentation defect, or in the treatment of a defect in the protection of a fetus against microbial (more particularly viral) infection in a pregnant Boreoeutheria.

[0342] More particularly, the application relates to said (sub-)fragments of (soluble) ectodomain fragments, for use in the production of antibodies, more particularly of monoclonal antibodies by immunization in a non-human mammal.

[0343] The application also relates to any composition, more particularly any pharmaceutical composition, which comprises at least one polypeptide or cell of the application, more particularly at least one of said soluble N-terminal ectodomain fragments, said C-terminal protein fragments, said C-terminal ectodomain fragments and said cells. Said composition (or pharmaceutical composition) may optionally further comprise at least one (pharmaceutically acceptable) vehicle, and/or blood or tissue cells from a Boreoeutheria and/or at least one immune adjuvant, and/or at least one buffer.

[0344] More particularly, the application relates to a composition, which comprises at least one of said soluble N-terminal ectodomain fragments and/or one of said cells, and which optionally further comprises blood of a Boreoeutheria.

[0345] More particularly, the application relates to a composition or pharmaceutical composition or drug, which comprises at least one of said soluble N-terminal ectodomain fragments, and which optionally further comprises at least one pharmaceutically acceptable vehicle. Such a pharmaceutical composition or drug might be useful e.g., in the treatment of a defect in placentation, or in the treatment of a defect in the protection of a fetus against microbial (more particularly viral) infection in a pregnant Boreoeutheria.

[0346] More particularly, the application relates to a composition or pharmaceutical composition, which comprises at least one of said (sub-)fragments of (soluble) ectodomain fragments, and which optionally further comprises at least one vaccine adjuvant. This composition may be useful for administration to a non-human mammal to produce antibodies, more particularly monoclonal antibodies which binds to, more particularly which specifically binds to, a polypeptide of the application.

[0347] More particularly, the application relates to a composition or pharmaceutical composition, which comprises at least one of said C-terminal protein fragments and said C-terminal ectodomain fragments, and which may optionally further comprise at least one buffer.

[0348] More particularly, the application relates to a composition or pharmaceutical composition, which comprises at least one of said cells (which expresses at least one of said C-terminal protein fragments and said C-terminal ectodomain fragments), and which may optionally further comprise blood or cell tissue from a Boreoeutheria.

[0349] More particularly, the application relates to a composition or pharmaceutical composition or drug, which comprises at least one of said cells or part of said cells, e.g. exosomes, (which expresses at least one of said C-terminal protein fragments and said C-terminal ectodomain fragments), and which optionally further comprises at least one pharmaceutically acceptable vehicle. Such a pharmaceutical composition or drug might be useful e.g., in the treatment of a defect in placentation.

[0350] The expression “cell” includes cell and part of a cell such as exosome, more particularly the expression “cell” includes cell and exosome.

[0351] The application also relates to a product, more particularly to a protein or proteinaceous product, wherein said product is:
[0352] an antibody, or
[0353] a monoclonal antibody, more particularly the monoclonal antibody which is produced by the hybridoma deposited at the CNCM on Jun. 20, 2017 under the terms of the Budapest Treaty under accession number I-5211, or
[0354] a fragment of (monoclonal) antibody, which has retained the antigen binding specificity of said (monoclonal) antibody, such as a Fab, Fab′ or F(ab)2 fragment, or
[0355] a fusion protein, which has retained the antigen binding specificity of said (monoclonal) antibody, such as a scFv, or
[0356] a single-domain antibody (sdAb), or
[0357] the variable domain of a sdAb,
   wherein said product specifically binds to:
[0358] one of said soluble N-terminal ectodomain fragments and (sub-)fragments of (soluble) ectodomain fragments; or to
[0359] one of said C-terminal protein fragments and C-terminal ectodomain fragments.

[0360] CNCM is Collection Nationale de Culture de Microorganismes (Institut Pasteur; 28, rue du Docteur Roux; 75724 Paris CEDEX 15; France).

[0361] More particularly, the application also relates to a (proteinaceous) product, wherein said (proteinaceous) product specifically binds to one of said soluble N-terminal ectodomain fragments and (sub-)fragments of (soluble) ectodomain fragments, without binding to one of said C-terminal protein fragments and C-terminal ectodomain fragments.

[0362] More particularly, the application also relates to a product, more particularly to a protein or (proteinaceous) product, wherein said product specifically binds to one of said C-terminal protein fragments and C-terminal ectodomain fragments, without binding to one of said soluble N-terminal ectodomain fragments and (sub-)fragments of (soluble) ectodomain fragments.

[0363] The phrase “antibody” or “monoclonal antibody” includes conventional antibody (which comprises a heavy chain and a light chains) as well as single-domain antibody (sdAb; which, by contrast to a conventional antibody, is devoid of light chains and consists of a single monomeric variable antibody domain), such as a Heavy Chain Antibody (hcAb).

[0364] The phrase “antibody” or “monoclonal antibody” includes mono-, bi- or tri-specific antibodies.

[0365] The expression “fragment of (monoclonal) antibody, which has retained the antigen binding specificity” includes Fab, Fab′ and F(ab)2 fragments (of a conventional Ab or mAb), as well as the variable domain of a sdAb or hcAb (VHH or nanobody).

[0366] The expression “fusion protein, which has retained the antigen binding specificity of said (monoclonal) antibody” includes scFv.

[0367] The CDRs (or at least one of the CDR1, CDR2 and CDR3) of said antibody, antibody fragment or fusion protein may be the CDRs (or at least one of the CDR1, CDR2 and CDR3, respectively) of the monoclonal antibody which is produced by the hybridoma deposited on Jun. 20, 2017 at the CNCM under accession number I-5211.

[0368] Said antibody, antibody fragment or fusion protein may optionally be linked or bound to at least one detection label or marker or tag or drug.

[0369] The application also relates to drug-conjugated antibody to target HEMO-tumor cells, wherein said antibody is one of the antibodies herein defined.

[0370] Said HEMO tumor cells express at their surface a polypeptide, said polypeptide being one of said N-terminal (soluble) ectodomain fragments or one of said C-terminal protein fragments of the application.

[0371] The application also relates to a product, more particularly to a protein or proteinaceous product, wherein said product is:
[0372] an antibody, or
[0373] a monoclonal antibody, or
[0374] a fragment of (monoclonal) antibody, which has retained the antigen binding specificity of said (monoclonal) antibody, such as a Fab, Fab′ or F(ab)2 fragment, or
[0375] a fusion protein, which has retained the antigen binding specificity of said (monoclonal) antibody, such as a scFv, or
[0376] a single-domain antibody (sdAb), or
[0377] the variable domain of a sdAb,
   and wherein said product is optionally linked to at least one detection label or marker or tag or drug, and wherein said product specifically binds to a (human) HEMO antigen chosen from among the sequences of SEQ ID NOs: 8, 919, 924-939, 981-988 and 990.

[0378] The application also relates to a hybridoma, which produces a monoclonal antibody of the application. More particularly, the application relates to the hybridoma (2F7-E8) deposited on Jun. 20, 2017 at the CNCM under accession number I-5211 (which is directed against a fragment of the human HEMO ectodomain, i.e., a sub-fragment of a N-terminal soluble polypeptide of the application, i.e., fragment 123-286 from SEQ ID NO: 1 (fragment of SEQ ID NO: 8). More particularly, the application relates to the monoclonal antibody produced by the hybridoma (2F7-E8) deposited on Jun. 20, 2017 at the CNCM under accession number I-5211, possibly humanized, which is linked or bound to at least one detection label or marker or tag or drug. Said hybridoma (2F7-E8) or monoclonal antibody produced by the hybridoma (2F7-E8) deposited on Jun. 20, 2017 at the CNCM under accession number I-5211 is able to recognize a sub-fragment of a N-terminal soluble polypeptide of the application as well as the non-soluble form of said sub-fragment of a N-terminal soluble polypeptide of the application when the HEMO protein has not yet been shedding.

[0379] The application also relates to a Chimeric Antigen Receptor T cell (i.e., a CAR-T cell), wherein said Chimeric Antigen Receptor comprises an extracellular single-chain variable fragment (scFv) linked to an intracellular T Cell Receptor (TCR) signaling domain, and wherein said scFv is a scFv of the application.

[0380] Said intracellular TCR signaling domain may e.g., be CD3zeta.

[0381] Said scFv may be indirectly linked to said TCR signaling domain, e.g., via a hinge/spacer peptide and/or a transmembrane domain. The intracellular portion of the CAR may, in addition to said TCR signaling domain, comprise at least one costimulatory domain, such as CD28 or 4-1BB.

[0382] The application also relates to the antibody or monoclonal antibody of the application, or to the CAR-T cell of the application, for use in therapy, e.g., for use in anti-cancer treatment, more particularly in the treatment of a solid tumor.

[0383] Said antibody, monoclonal antibody, CAR-T cell may (specifically) bind to a tumor cell or to a tumor stem cell.

[0384] Said cancer is e.g., an ovarian cancer, an uterine cancer (more particularly an endometrial cancer, a cervical cancer, a gestational cancer (including placental cancer, e.g., choriocarcinoma)), a breast cancer, a lung cancer, a stomach cancer, a colon cancer, a liver cancer, a kidney cancer, a prostate cancer, an urothelial cancer, a germ cell cancer, a brain cancer, a head and neck cancer, a pancreatic cancer, a thyroid cancer, a thymus cancer, a skin cancer, a bone cancer or a bone marrow cancer. As urothelial cancers encompass carcinomas of the bladder, ureters and renal pelvis, said cancer may also be an urothelial cancer including a bladder cancer, an ureter cancer or a renal pelvis cancer.

[0385] The application also relates to the antibody or monoclonal antibody of the application, or to the CAR-T cell of the application, for use in diagnosis, more particularly in (in vitro) cancer diagnosis, more particularly in an (in vitro) method for determining the histotype, grade or stage of a tumor of a subject, or in an (in vitro) method for detecting a defect in the placentation of a pregnant subject, more particularly a placentation defect placing said pregnant subject at risk of placental abruption, pre-eclampsia or eclampsia.

[0386] The application also relates to the antibody or monoclonal antibody of the application, or to the CAR-T cell of the application, for use in an (in vitro) method for purifying or isolating circulating cells of a Boreoeutheria, more particularly for purifying or isolating circulating cells, which are tumor cells, or tumor stem cells, or placental cells, or in an (in vitro) method for inducing pluripotent stem cells from somatic cells.

[0387] The application also relates to the drug-conjugated (monoclonal) antibody of the application or to the CAR-T cell of the application, for use in therapy, more particularly for use in targeting tumoral cells in a Boreoeutheria suffering from tumor, wherein said tumoral cells expressed at their surface a polypeptide, said polypeptide being one of said N-terminal (soluble) ectodomain fragments or one of said C-terminal protein fragments of the application.

[0388] Said tumor is e.g., an ovarian tumor, an uterine tumor (more particularly an endometrial tumor, a cervical tumor, a gestational tumor (including placental tumor, e.g., choriocarcinoma)), a breast tumor, a lung tumor, a stomach tumor, a colon tumor, a liver tumor, a kidney tumor, a prostate tumor, an urothelial tumor, a germ cell tumor, a brain tumor, a head and neck tumor, a pancreatic tumor, a thyroid tumor, a thymus tumor, a skin tumor, a bone tumor or a bone marrow tumor. As urothelial tumors encompass carcinomas of the bladder, ureters and renal pelvis, said tumor may also be an urothelial tumor including a bladder tumor, a ureter tumor or a renal pelvis tumor.

[0389] The application also relates to a kit, which comprises product, more particularly to a protein or proteinaceous product, and which further comprises an instruction leaflet instructing to use said product in at least one of the following five uses:
[0390] the detection of the appearance of a tumor or the following of the evolution of a tumor in a subject, wherein said subject is a Boreoeutheria,
[0391] the determination of the histotype, grade or stage of a tumor, wherein said cancer is more particularly an ovarian cancer, an uterine cancer (more particularly an endometrial cancer, a cervical cancer, a gestational cancer (including placental cancer, e.g., choriocarcinoma)), a breast cancer, a lung cancer, a stomach cancer, a colon cancer, a liver cancer, a kidney cancer, a prostate cancer, an urothelial cancer (including bladder cancer, ureter cancer or renal pelvis cancer), a germ cell cancer, a brain cancer, a head and neck cancer, a pancreatic cancer, a thyroid cancer, a thymus cancer, a skin cancer, a bone cancer or a bone marrow cancer,
[0392] the detection of a defect in the placentation of a pregnant subject, more particularly a placentation defect placing said pregnant subject at risk of placental abruption, pre-eclampsia or eclampsia,
[0393] the purification or isolation of circulating cells of a Boreoeutheria, more particularly for purifying or isolating circulating cells, which are tumor cells, or tumor stem cells, or placental cells,
[0394] the purification or isolation of non-circulating cells of a Boreoeutheria, more particularly for purifying or isolating non-circulating cells in a fresh tumor or biopsy sample from a Boreoeutheria,
   wherein said (proteinaceous) product is the (proteinaceous) product of the application, and
   wherein said (proteinaceous) product is optionally linked or bound to a detection label.

[0395] The application also relates to a nucleic acid, which codes a polypeptide, wherein said polypeptide consists of one of said soluble N-terminal ectodomain fragments, said (sub-)fragments of (soluble) ectodomain fragments, said C-terminal protein fragments and said C-terminal ectodomain fragments. Said nucleic acid may be a DNA, a RNA, or a cDNA.

[0396] A nucleic acid coding for human HEMO is the sequence of SEQ ID NO: 152. A nucleic acid coding for non-human HEMO can be chosen from among the sequences of SEQ ID NO: 153-167.

[0397] The application relates more particularly to the fragments of the sequences of SEQ ID NO: 152 and 153-167, which codes for a polypeptide, wherein said polypeptide consists of one of said soluble N-terminal ectodomain fragments, said (sub-)fragments of (soluble) ectodomain fragments, said C-terminal protein fragments and said C-terminal ectodomain fragments.

[0398] The application also relates to a nucleic acid vector, more particularly to a nucleic acid expression vector, which (recombinantly) comprises at least one nucleic acid of the application.

[0399] The application also relates to an engineered host cell, which (recombinantly) comprises at least one nucleic acid or vector of the application.

[0400] The application also relates to a nucleic acid probe, which specifically hybridizes to a nucleic acid of the application.

[0401] The application also relates to a primer pair, which specifically amplifies at least one of the nucleic acids of the application.

[0402] The application also relates to the HEMO promoter, more particularly to the human HEMO promoter, more particularly to the human HEMO promoter of SEQ ID NO: 669.

[0403] The application also relates to a kit, which comprises at least one (proteinaceous) product of the application, or at least probe, primer pair or set of oligonucleotides of the application, wherein said kit optionally further comprises an instruction leaflet for use of the kit in the detection of shed forms of the HEMO protein and/or in the detection of tumor cells, of stem cells or of tumor stem cells.

[0404] The application also relates to a solid support, such a membrane or a chip, onto which at least one (proteinaceous) product of the application, or at least probe, primer pair or set of oligonucleotides of the application is bound, linked or attached.

[0405] The application also relates to any composition, pharmaceutical composition or drug, which comprises at least one product of the application, and which optionally further comprises at least one buffer or pharmaceutically acceptable vehicle (or diluent or adjuvant).

[0406] The application relates more particularly to such a pharmaceutical composition or drug, wherein said at least one product of the application is at least one antibody, monoclonal antibody or CAR-T cell of the application. Such a pharmaceutical composition or drug might be useful e.g., in the treatment of cancer, more particularly of an ovarian cancer, an uterine cancer (more particularly an endometrial cancer, a cervical cancer, a gestational cancer (including placental cancer, e.g., choriocarcinoma)), a breast cancer, a lung cancer, a stomach cancer, a colon cancer, a liver cancer, a kidney cancer, a prostate cancer, an urothelial cancer, a germ cell cancer, a brain cancer, a head and neck cancer, a pancreatic cancer, a thyroid cancer, a thymus cancer, a skin cancer, a bone cancer or a bone marrow cancer. As urothelial cancers encompass carcinomas of the bladder, ureters and renal pelvis, said cancer may also be an urothelial cancer including a bladder cancer, an ureter cancer or a renal pelvis cancer.

[0407] According to a particular embodiment, the invention relates to an isolated cell or part of a cell (e.g. exosome), which expresses the C-terminal protein fragments and C-terminal ectodomain fragments herein defined, wherein a portion of the C-terminal protein fragments and C-terminal ectodomain fragments herein defined is expressed at the surface of said cell or said part of said cell, and wherein said surface-expressed portion comprises the C-terminal fragment of ectodomain which is comprised in said the C-terminal protein fragments and C-terminal ectodomain fragments herein defined,

more particularly wherein said cell or said part of said cell is a placental cell or a part of a placental cell, a stem cell or a part of a stem cell, a tumor cell or a part of a tumor cell, or a tumor stem cell or a part of a tumor stem cell.

[0408] According to a particular embodiment, the invention relates to an isolated cell, which expresses the C-terminal protein fragments and C-terminal ectodomain fragments herein defined, wherein a portion of the C-terminal protein fragments and C-terminal ectodomain fragments herein defined is expressed at the surface of said cell, and wherein said surface-expressed portion comprises the C-terminal fragment of ectodomain which is comprised in said the C-terminal protein fragments and C-terminal ectodomain fragments herein defined, more particularly wherein said cell is a placental cell, a stem cell, a tumor cell or a tumor stem cell.

[0409] According to another particular embodiment, the invention relates to the soluble N-terminal ectodomain fragments and (sub-)fragments of (soluble) ectodomain fragments herein defined, for use in therapy, more particularly for use in the treatment of a defect in placentation of a Boreoeutheria or in the treatment of a defect in the protection against microbial infection, more particularly viral infection, of a fetus carried by a Boreoeutheria.

[0410] According to another particular embodiment, the invention also relates to a product, wherein said product is:
[0411] a. an antibody, or
[0412] b. a monoclonal antibody, more particularly the monoclonal antibody which is produced by the hybridoma deposited at the CNCM under accession number I-5211, or
[0413] c. a Fab, Fab′ or F(ab)2 fragment, or
[0414] d. a scFv, or
[0415] e. a sdAb, or
[0416] f. the variable domain of a sdAb,
   and wherein said product is optionally linked to at least one drug,
   and wherein said product specifically binds to the said soluble N-terminal ectodomain fragments and (sub-)fragments of (soluble) ectodomain fragments herein defined.

[0417] According to another particular embodiment, the invention also relates to product, wherein said product is:
[0418] a. an antibody, or
[0419] b. a Fab, Fab′ or F(ab)2 fragment, or
[0420] c. a scFv, or
[0421] d. a sdAb, or
[0422] e. the variable domain of a sdAb,
   and wherein said product is optionally linked to at least one drug,
   and wherein said product specifically binds to the said C-terminal protein fragments and C-terminal ectodomain fragments herein defined.

[0423] According to another particular embodiment, the invention relates to a chimeric Antigen Receptor T cell (CAR-T cell), wherein said Chimeric Antigen Receptor comprises a scFv linked to a TCR signaling domain, and wherein said scFv is the scFv of said product herein defined.

[0424] More particularly, the invention relates to said products herein defined, or the CAR-T cell herein defined, for use in therapy, more particularly in anti-cancer therapy, wherein said product or CAR-T cell binds to a tumor cell or to a tumor stem cell, and wherein said cancer is more particularly an ovarian cancer, an uterine cancer, a cervical cancer, a gestational cancer, a breast cancer, a lung cancer, a stomach cancer, a colon cancer, a liver cancer, a kidney cancer, a prostate cancer, an urothelial cancer (including bladder cancer, ureter cancer or renal pelvis cancer), a germ cell cancer, a brain cancer, a head and neck cancer, a pancreatic cancer, a thyroid cancer, a thymus cancer, a skin cancer, a bone cancer or a bone marrow cancer.

[0425] More particularly, the invention also relates to a kit which comprises a product, wherein said product is used in at least one of the following five uses:
[0426] a. the detection of the appearance of a tumor or the following of the evolution of a tumor in a subject, wherein said subject is a Boreoeutheria;
   and/or
[0427] b. the determination of the histotype, grade or stage of a tumor, wherein said cancer is an ovarian cancer, an uterine cancer, a cervical cancer, a gestational cancer, a breast cancer, a lung cancer, a stomach cancer, a colon cancer, a liver cancer, a kidney cancer, a prostate cancer, an urothelial cancer (including bladder cancer, ureter cancer or renal pelvis cancer), a germ cell cancer, a brain cancer, a head and neck cancer, a pancreatic cancer, a thyroid cancer, a thymus cancer, a skin cancer, a bone cancer or a bone marrow cancer;
   and/or
[0428] c. the detection of a defect in the placentation of a pregnant subject, more particularly a placentation defect placing said pregnant subject at risk of placental abruption, pre-eclampsia or eclampsia;
   and/or
[0429] d. the purification or isolation of circulating cells of a Boreoeutheria, more particularly for purifying or isolating Boreoeutheria circulating cells, which are tumor cells, or tumor stem cells, or placental cells,
   and/or
[0430] e. the purification or isolation of non-circulating cells of a Boreoeutheria, more particularly for purifying or isolating Boreoeutheria non-circulating cells in a biopsy or tumor samples from said Boreoeutheria, and
   wherein said (proteinaceous) product is the (proteinaceous) product of the application, and
   wherein said (proteinaceous) product is optionally linked or bound to a detection label.

### Methods

[0431] The application relates to methods, which involves or implements at least one product of the application, more particularly at least one of said soluble N-terminal ectodomain fragments, said (sub-)fragments of (soluble) ectodomain fragments, said C-terminal protein fragments, said C-terminal ectodomain fragments, said cells, said (proteinaceous) products, and said probes and/or primers.

[0432] The methods of the application notably comprise methods of:
[0433] tumor typing,
[0434] cancer diagnostic,
[0435] cancer immunotherapy,
[0436] screening for therapeutic agents, e.g., screening for agents, which may be useful in the treatment of cancer (including palliation or prevention of cancer), or for agents, which may be useful in the treatment of a defect in placenta development (e.g., placental abruption, pre-eclampsia, eclampsia), or for agents, which may be useful in fetus protection (e.g., protection against viral or microbial infection),
[0437] purification of circulating cells (e.g., purification of tumoral circulating cells, or of circulating trophoblasts), and
[0438] production of induced pluripotent stem cells (from somatic cells).

[0439] More particularly, the application relates to an (in vitro) method for detecting that tumor cells or tumor stem cells are present in a subject, wherein said subject is a Boreoeutheria, and wherein said in vitro method comprises at least one of the following two steps i. and ii.:

i. detecting a polypeptide which is contained in soluble form in a sample, wherein said polypeptide in soluble form is one of the soluble N-terminal ectodomain fragments of the application, wherein said sample is a blood sample or an urine sample or an ascites liquid sample from said subject, or a biopsy sample of a tissue from said subject, or a protein extract of said blood sample or urine sample or ascites liquid sample or biopsy sample (more particularly a soluble protein extract of said blood sample or urine sample or biopsy sample), and wherein detecting said polypeptide in soluble form in said sample is indicative that tumor cells or tumor stem cells are present in said subject; and
ii. detecting cells in a sample, wherein said cells are or comprises the cells of the application (which express at least one of said C-terminal ectodomain fragments at their surface), wherein said sample is a blood sample or an urine sample or an ascites liquid sample from said subject, a biopsy sample of a tissue from said subject, or the cell fraction of said blood or urine or ascites liquid or biopsy sample, and wherein detecting said cells in said sample is indicative that tumor cells or tumor stem cells are present in said subject.

[0440] The application also relates to an (in vitro) method for detecting the appearance of a tumor or for following the evolution of a tumor in a subject, wherein said subject is a Boreoeutheria, and wherein said (in vitro) method comprises at least one of the following two steps i. and ii.:

i. detecting a polypeptide which is contained in soluble form in a sample, wherein said polypeptide in soluble form is one of the soluble N-terminal ectodomain fragments of the application, wherein said sample is a blood sample or an urine sample or an ascites liquid sample from said subject, or a biopsy sample of a tissue from said subject, or a protein extract of said blood sample or urine sample or ascites liquid sample or biopsy sample (more particularly a soluble protein extract of said blood sample or urine sample or biopsy sample), and wherein detecting said polypeptide in soluble form in said sample is indicative that tumor cells or tumor stem cells are present in said subject; and
ii. detecting cells in a sample, wherein said cells are or comprises the cells of the application (which express at least one of said C-terminal ectodomain fragments at their surface), wherein said sample is a blood sample or an urine sample or an ascites liquid sample from said subject, a biopsy sample of a tissue from said subject, or the cell fraction of said blood or urine or ascites liquid or biopsy sample, and wherein detecting said cells in said sample is indicative that tumor cells or tumor stem cells are present in said subject.

[0441] The expression “following the evolution of a tumor in a subject” encompasses the detection of the appearance of said tumor or the detection of the reappearance of said tumor after treatment and the determining of the histotype, grade or stage of said tumor before treatment and during treatment.

[0442] More particularly, the application relates to an (in vitro) method herein defined for detecting the appearance of a tumor secreting one of the soluble N-terminal ectodomain fragments of the application at a concentration higher than the average concentration measured in a sample of a control subject.

[0443] More particularly, the application relates to an (in vitro) method herein defined for detecting the reappearance of tumor after treatment.

[0444] Said tumor may e.g., be an ovarian tumor, an uterine tumor (more particularly an endometrial tumor, a cervical tumor, a gestational tumor (including placental tumor, e.g., choriocarcinoma)), a breast tumor, a lung tumor, a stomach tumor, a colon tumor, a liver tumor, a kidney tumor, a prostate tumor, an urothelial tumor, a germ cell tumor, a brain tumor, a head and neck tumor, a pancreatic tumor, a thyroid tumor, a thymus tumor, a skin tumor, a bone tumor or a bone marrow tumor. As urothelial tumors encompass carcinomas of the bladder, ureters and renal pelvis, said tumor may also be an urothelial tumor including a bladder tumor, an ureter tumor or a renal pelvis tumor.

[0445] The application also relates to an (in vitro) method for determining the histotype, grade or stage of a tumor of a subject, wherein said subject is a Boreoeutheria, and wherein said in vitro method comprises at least one of the following two steps i. and ii.:

i. detecting a polypeptide which is contained in soluble form in a sample, wherein said polypeptide in soluble form is one of the soluble N-terminal ectodomain fragments of the application, wherein said sample is a blood sample or an urine sample or an ascites liquid sample from said subject, or a biopsy sample of said tumor, or a protein extract of said blood sample or urine sample or ascites liquid simple or tumor biopsy sample (more particularly a soluble protein extract of said blood sample or urine sample or tumor biopsy sample), and wherein detecting said polypeptide in soluble form in said sample determines the histotype, grade or stage of said tumor; and
ii. detecting cells in a sample, wherein said cells are or comprise the cells of the application (which express at least one of said C-terminal ectodomain fragments at their surface), wherein said sample is a blood sample or an urine sample or an ascites liquid sample from said subject, a biopsy sample of said tumor, or the cell fraction of said blood or urine or ascites liquid or biopsy sample, and wherein detecting said cells in said sample determines the histotype, grade or stage of said tumor.

[0446] More particularly, the application relates to an (in vitro) method for determining the histotype, grade or stage of a tumor of a subject, wherein said subject is a Boreoeutheria, and wherein said in vitro method comprises detecting cells in a sample, wherein said cells are or comprise the cells of the application (which express at least one of said C-terminal ectodomain fragments at their surface), wherein said sample is a biopsy sample of said tumor, or the cell fraction of said biopsy sample, and wherein detecting said cells in said sample determines the histotype, grade or stage of said tumor.

[0447] Detecting said polypeptide in soluble form or detecting said cells may comprise measuring the quantity or concentration of said polypeptide or cells, respectively, and optionally comparing the measured quantity or concentration to a reference quantity or concentration (e.g., a control quantity or concentration).

[0448] Said tumor may e.g., be an ovarian tumor, an uterine tumor (more particularly an endometrial tumor, a cervical tumor, a gestational tumor (including placental tumor, e.g., choriocarcinoma)), a breast tumor, a lung tumor, a stomach tumor, a colon tumor, a liver tumor, a kidney tumor, a prostate tumor, an urothelial tumor, a germ cell tumor, a brain tumor, a head and neck tumor, a pancreatic tumor, a thyroid tumor, a thymus tumor, a skin tumor, a bone tumor or a bone marrow tumor. As urothelial tumors encompass carcinomas of the bladder, ureters and renal pelvis, said tumor may also be an urothelial tumor including a bladder tumor, an ureter tumor or a renal pelvis tumor.

[0449] A concentration (significantly) higher than
[0450] the average concentration measured in the blood of a control subject (control subject with no cancer and no tumor), or
[0451] the average concentration routinely measured in the blood of a subject
   might be indicative of the presence of a tumor in said subject. The average concentration measured in the blood of a control subject (with no cancer/no tumor) may e.g., be of 1 fM-1 mM or 1 fM-1 μM or 1 fM-1 nM or 1 fM-1 pM or 1 pM-1 mM or 1 pM-1 μM or 1 pM-1 nM or 1 nM-1 mM or 1 nM-1 μM or 1 μM-1 mM or 1 fM-100 pM or 1 fM-10 pM or 1 pM-100 nM or 1 pM-10 nM or 1 nM-100 μM or 1 nM-10 μM or 1 μM-100 mM or 1 μM-10 mM or 1 pM-10 nM or 1 pM-10 pM or 1 pM-100 pM or 100 pM-10 nM or 1 nM-100 nM or 1 nM-10 nM or 10 nM-100 nM or 5 nM-100 nM or 1 nM-5 nM. A concentration outside these normal ranges herein and higher than the superior extremity of said ranges, e.g. 1 mM or 1 μM or 1 nM, or 1 pM or 100 nM or 100 pM or 10 nM or 10 pM or 5 nM, may be indicative of the presence of a tumor in said subject.

[0452] The tumor histotype, grade or stage, which has been thus determined, may guide the physician in selecting the anti-tumor treatment and/or in adjusting the anti-tumor treatment. The application thus relates to a method for selecting an anti-cancer treatment for a subject in need thereof, which comprises determining the histotype, grade or stage of said tumor using the histotyping/grading/staging method of the application, and selecting among the anti-cancer treatments by surgery, chimiotherapy, radiotherapy and hormonotherapy, a treatment, which is adapted to said tumor histotype, grade or stage.

[0453] The application also relates to an (in vitro) method for detecting a defect in the placentation of a pregnant subject, more particularly a placentation defect placing said pregnant subject at risk of placental abruption, pre-eclampsia or eclampsia, wherein said subject is a Boreoeutheria, and wherein said in vitro method comprises at least one of the following two steps i. and ii.:

i. measuring the quantity or concentration of a polypeptide in soluble form in a sample, wherein said polypeptide in soluble form is one of the soluble N-terminal ectodomain fragments of the application, wherein said sample is a blood sample or an urine sample or an amniotic liquid sample from said subject or a (soluble) protein extract of said blood or urine or amniotic liquid sample, and wherein (measuring) said quantity or concentration in said sample is indicative of a defect in the placentation of said subject; and
ii. measuring the quantity or concentration of cells in a sample, wherein said cells are the cells of the application (which express at least one of said C-terminal ectodomain fragments at their surface), wherein said sample is a blood sample or an urine sample or an amniotic liquid sample from said Boreoeutheria or a placenta sample from said Boreoeutheria or a cell extract from said blood or urine or amniotic liquid or placenta sample, and wherein (measuring) said quantity or concentration in said sample is indicative of a defect in the placentation of said subject.

[0454] More particularly, the application relates to an in vitro method for detecting a defect in the placentation of a pregnant subject (e.g., placental abruption, pre-eclampsia, eclampsia), wherein said subject is a Boreoeutheria, wherein said in vitro method comprises measuring the quantity or concentration of a polypeptide in soluble form in a sample, wherein said polypeptide in soluble form is one of the soluble N-terminal ectodomain fragments of the application, wherein said sample is a blood sample from said Boreoeutheria or a (soluble) protein extract from said blood sample, and wherein (measuring) said quantity or concentration in said sample is indicative of a defect in the placentation of said subject.

[0455] A concentration (significantly) higher or lower than the average concentration measured in the blood of a control subject (pregnant control subject with normal placentation) might be indicative of a defect in the placentation of said subject.

[0456] The average concentration measured in the blood of a control subject (pregnant control subject with normal placentation) may e.g., be of be of 1 fM-1 mM or 1 fM-1 μM or 1 fM-1 nM or 1 fM-1 pM or 1 pM-1 mM or 1 pM-1 uM or 1 pM-1 nM or 1 nM-1 mM or 1 nM-1 μM or 1 μM-1 mM or 1 fM-100 pM or 1 fM-10 pM or 1 pM-100 nM or 1 pM-10 nM or 1 nM-100 μM or 1 nM-10 μM or 1 μM-100 mM or 1 μM-10 mM or 1 pM-10 nM or 1 pM-10 pM or 1 pM-100 pM or 100 pM-10 nM or 1 nM-100 nM or 1 nM-10 nM or 10 nM-100 nM or 5 nM-100 nM or 1 nM-5 nM, particularly of 1 nM-10 nM (at e.g., the third trimester of pregnancy). A concentration outside this normal range at e.g., the third trimester of pregnancy (for example a concentration, which at the third trimester of pregnancy is below said normal range), may be indicative of a defect in the placentation of said subject.

[0457] The application also relates to an (in vitro) method for testing a Boreoeutheria for pregnancy, which comprises

i. measuring the quantity or concentration of a polypeptide in soluble form in a blood sample from said subject, wherein said polypeptide in soluble form is one of the soluble N-terminal ectodomain fragments of the application, and wherein measuring said quantity or concentration in said sample is indicative of the pregnancy or non-pregnancy of said Boreoeutheria; and
ii. measuring the quantity or concentration of cells in a blood sample from said subject, wherein said cells are the cells of the application (which express at least one of said C-terminal ectodomain fragments at their surface), and wherein measuring said quantity or concentration in said sample is indicative of the pregnancy or non-pregnancy of said Boreoeutheria.

[0458] A quantity or concentration (significantly) higher or lower than the average quantity or concentration measured in the blood of a control subject (non-pregnant control subject) might be indicative of said Boreoeutheria being pregnant or non-pregnant.

[0459] The application also relates to an (in vitro) method for detecting a defect in the protection of a fetus against microbial (more particularly viral) infection in a pregnant Boreoeutheria, wherein said in vitro method comprises at least one of the following two steps i. and ii.:

i. measuring the quantity or concentration of a polypeptide in soluble form in a blood sample from said pregnant Boreoeutheria, wherein said polypeptide in soluble form is one of the soluble N-terminal ectodomain fragments of the application, and wherein measuring said quantity or concentration in said sample is indicative of a defect in the protection of said fetus against microbial (more particularly viral) infection; and
ii. measuring the quantity or concentration of cells or part of cell (e.g. exosome) in a blood sample from said pregnant Boreoeutheria, wherein said cells are the cells of the application (which express at least one of said C-terminal ectodomain fragments at their surface), [optionally determining by genetic analysis whether said cells are maternal cells or fetal cells], and wherein measuring said quantity or concentration in said sample is indicative of a defect in the protection of said fetus against microbial (more particularly viral) infection.

[0460] A quantity or concentration (significantly) higher or lower than the average concentration measured in the blood of a control subject (pregnant control subject with normal placentation) might be indicative of a defect in the placentation of said subject.

[0461] The application also relates to an (in vitro) method for determining whether a compound is a candidate active principle for therapy in a Boreoeutheria, wherein said therapy is the treatment of a defect in placentation of said Boreoeutheria or the treatment of a defect in the protection against microbial (more particularly viral) infection of a fetus carried by said Boreoeutheria, wherein said (in vitro) method comprises placing said compound in contact with a ligand of one of the soluble N-terminal ectodomain fragments of the application to perform a ligand binding assay, and detecting whether said compound binds to said ligand, wherein detecting said binding is indicative that said compound is a candidate active principle for said therapy.

[0462] In addition to being placed in contact with a ligand of one of the soluble N-terminal ectodomain fragments of the application, said compound can be placed in contact with one of the soluble N-terminal ectodomain fragments of the application to perform a competitive binding assay. Detecting competition between said compound and said polypeptide for binding to said ligand may be indicative that said compound is a candidate active principle for said therapy.

[0463] Said ligand may e.g., be a monoclonal antibody or scFv of the application.

[0464] The application also relates to an (in vitro) method for determining whether a compound is a candidate active principle for therapy in a Boreoeutheria, wherein said therapy is the treatment of a cancer in said Boreoeutheria, wherein said method comprises

placing said compound in contact with one of the soluble N-terminal ectodomain fragments of the application to perform a polypeptide binding assay, and detecting whether said compound binds to said polypeptide, wherein detecting said binding is indicative that said compound is a candidate active principle for said therapy.

[0465] In addition to being placed in contact with one of the soluble N-terminal ectodomain fragments of the application, said compound can be placed in contact with a ligand of said polypeptide to perform a competitive binding assay. Detecting competition between said compound and said ligand for binding to said polypeptide may be indicative that said compound is a candidate active principle for said therapy.

[0466] Said ligand may e.g., be a monoclonal antibody or scFv of the application.

[0467] The application also relates to an (in vitro) method for purifying or isolating circulating cells of a Boreoeutheria, wherein said method comprises purifying or isolating cells from a sample of circulating blood of said Boreoeutheria or from the cell fraction of such a sample, wherein said cell purification or isolation comprises positively sorting cells, which express a cell marker at their surface, and wherein said cells are the cells of the application (which express at least one of said C-terminal ectodomain fragments at their surface).

[0468] More particularly, the application also relates to an (in vitro) method for purifying or isolating circulating cells of a Boreoeutheria, more particularly for purifying or isolating Boreoeutheria circulating cells, which are tumor cells, or tumor stem cells, or placental cells, wherein said method comprises purifying or isolating cells from a sample of circulating blood of said Boreoeutheria or from the cell fraction of such a sample, wherein said cell purification or isolation comprises positively sorting cells that bind to a ligand, wherein said ligand is a (proteinaceous) product of the application.

[0469] Said positive sorting can be e.g., performed using a ligand, which specifically binds to a polypeptide that is expressed at the surface of said circulating cells, and wherein said polypeptide is one of said N-terminal (soluble) ectodomain fragments or one of said C-terminal protein fragments and C-terminal ectodomain fragments, more particularly one of said C-terminal protein fragments and C-terminal ectodomain fragments.

[0470] Said circulating cells may e.g., be tumor cells, or tumor stem cells, or placental cells.

[0471] The application also relates to an (in vitro) method for purifying or isolating non-circulating (tumoral) cells in a fresh tumor or biopsy sample from a Boreoeutheria to characterize the said non-circulating (tumoral) cells (with, e.g., RNAseq or DNAseq or PDXmice techniques), wherein said non-circualting (tumoral) cells purification or isolation comprises positively sorting cells that bind to a ligand, wherein said ligand is a (proteinaceous) product of the application.

[0472] The application also relates to an (in vitro) method for inducing pluripotent stem cells from somatic cells, which comprises introducing pluripotency-associated genes into somatic cells (e.g., into fibroblasts), and selecting those cells, which express the introduced pluripotency-associated genes, wherein said pluripotency-associated genes comprises a gene coding for a polypeptide, which consists of one of the soluble N-terminal ectodomain fragments of the application.

[0473] Said pluripotency-associated genes may further comprise one or several genes, which code for a transcription factor, for example one or several genes chosen from among the genes coding for the Oct4 (Pou5f1), Sox, Klf, Myc, Nanog, LIN28 and Glis1 transcription factors, for example one or several genes chosen from among the genes coding for the Oct4 (Pou5f1), Sox2, cMyc, and Klf4 transcription factors. Said pluripotency-associated genes can be carried on one or several viral vectors, more particularly on one or several retroviruses.

[0474] Said method may further comprise growing the selected cells in a cell culture medium. Said cell culture medium may comprise one or several components chosen from among basic Fibroblast Growth Factor (bFGF), cytokines (such as Tumor Growth Factor (TGF) or Wnt3a), Fetal Bovine Serum (FBS), human serum, collagen, albumin, cholesterol and insulin.

[0475] The application also relates to an (in vitro) method for detecting the soluble N-terminal ectodomain fragments and (sub-)fragments of (soluble) ectodomain fragments herein defined in a sample from a subject, which comprises or consists in an ELISA sandwich assay using at least:
[0476] a first monoclonal or polyclonal antibody directed against a first epitope of said soluble N-terminal ectodomain fragments or said (sub-)fragments of (soluble) ectodomain fragments, and
[0477] a second monoclonal or polyclonal antibody directed against a second epitope of said soluble
[0478] N-terminal ectodomain fragments or said (sub-)fragments of (soluble) ectodomain fragments,
   said first and second epitopes being different and wherein said sample is a blood or an urine or an amniotic liquid or an ascites liquid sample from said subject or a (soluble) protein extract of said blood or urine or amniotic liquid or ascites liquid sample.

[0479] For example, such an ELISA assay can be used to detect variability in the HEMO sera level, in normal and pathological conditions and/or follow the evolution in pathological conditions.

[0480] The term “comprising”, which is synonymous with “including” or “containing”, is open-ended, and does not exclude additional, un-recited element(s), ingredient(s) or method step(s), whereas the term “consisting of” is a closed term, which excludes any additional element, step, or ingredient which is not explicitly recited.

[0481] The term “essentially consisting of” is a partially open term, which does not exclude additional, un-recited element(s), step(s), or ingredient(s), as long as these additional element(s), step(s) or ingredient(s) do not materially affect the basic and novel properties of the invention.

[0482] The term “comprising” (or “comprise(s)”) hence includes the term “consisting of” (“consist(s) of”), as well as the term “essentially consisting of” (“essentially consist(s) of”). Accordingly, the term “comprising” (or “comprise(s)”) is, in the present application, meant as more particularly encompassing the term “consisting of” (“consist(s) of”), and the term “essentially consisting of” (“essentially consist(s) of”).

[0483] In an attempt to help the reader of the present application, the description has been separated in various paragraphs or sections. These separations should not be considered as disconnecting the substance of a paragraph or section from the substance of another paragraph or section. To the contrary, the present description encompasses all the combinations of the various sections, paragraphs and sentences that can be contemplated.

[0484] Each of the relevant disclosures of all references cited herein is specifically incorporated by reference. The following examples are offered by way of illustration, and not by way of limitation.

[0485] According to a particular embodiment, the invention relates to an in vitro method for detecting the soluble N-terminal ectodomain fragments and (sub-)fragments of (soluble) ectodomain fragments herein defined or the cells herein defined which express the C-terminal protein fragments and C-terminal ectodomain fragments, which comprises at least one of the following two steps a. and b.:
[0486] a. detecting a polypeptide which is contained in soluble form in a sample, wherein said polypeptide is the soluble N-terminal ectodomain fragments and (sub-)fragments of (soluble) ectodomain fragments herein defined;
   and/or
[0487] b. detecting cells in a sample, wherein said cells are or comprise the cells herein defined which express the C-terminal protein fragments and C-terminal ectodomain fragments.

[0488] According to another particular embodiment, the invention relates to the above in vitro method for determining the histotype, grade or stage of a tumor of a subject, wherein said subject is a Boreoeutheria, and wherein said in vitro method comprises at least one of the following two steps a. and b.:
[0489] a. detecting a polypeptide which is contained in soluble form in a sample, wherein said polypeptide is the soluble N-terminal ectodomain fragments and (sub-)fragments of (soluble) ectodomain fragments herein defined and wherein said sample is:
   [0490] a blood or urine or ascites liquid sample from said subject, or
   [0491] a biopsy sample of said tumor,
   [0492] or a soluble protein extract of said blood or urine or ascites liquid or tumor biopsy sample, and
      wherein detecting said polypeptide in soluble form in said sample determines the histotype, grade or stage of said tumor;
      and/or
[0493] b. detecting cells in a sample, wherein said cells are or comprise the cells herein defined which express the C-terminal protein fragments and C-terminal ectodomain fragments and wherein said sample is:
   [0494] a blood or urine or ascites liquid sample from said subject, or
   [0495] a biopsy sample of said tumor, or
   [0496] the cell fraction of said blood or urine or ascites liquid or biopsy sample, and
      wherein detecting said cells in said sample determines the histotype, grade or stage of said tumor.

[0497] According to another particular embodiment, the invention relates to the above in vitro method for detecting a defect in the placentation of a pregnant subject, more particularly a placentation defect placing said pregnant subject at risk of placental abruption, pre-eclampsia or eclampsia, wherein said subject is a Boreoeutheria, and wherein said in vitro method comprises at least one of the following two steps a. and b.:
[0498] a. measuring the quantity or concentration of a polypeptide in soluble form in a sample, wherein said polypeptide in soluble form is the soluble N-terminal ectodomain fragments and (sub-)fragments of (soluble) ectodomain fragments herein defined and wherein said sample is:
   [0499] a blood or urine or amniotic liquid sample from said subject,
   [0500] or a soluble protein extract of said blood or urine or amniotic liquid sample, and
      wherein said quantity or concentration in said sample is indicative of a defect in the placentation of said subject;
      and/or
[0501] b. measuring the quantity or concentration of cells in a sample, wherein said cells are the cells herein defined which express the C-terminal protein fragments and C-terminal ectodomain fragments and wherein said sample is:
   [0502] a blood or urine or amniotic liquid sample from said Boreoeutheria,
   [0503] or a placenta sample from said Boreoeutheria,
   [0504] or a cell extract from said blood or urine or amniotic liquid or placenta sample, and
      wherein said quantity or concentration in said sample is indicative of a defect in the placentation of said subject.

[0505] According to another particular embodiment, the invention relates to an in vitro method for purifying or isolating circulating cells of a Boreoeutheria, more particularly for purifying or isolating Boreoeutheria circulating cells, which are tumor cells, or tumor stem cells, or placental cells,

wherein said method comprises purifying or isolating cells from a sample of circulating blood of said Boreoeutheria or from the cell fraction of such a sample, wherein said cell purification or isolation comprises positively sorting cells that bind to a ligand, wherein said ligand is the product herein defined.

[0506] According to another particular embodiment, the invention relates to an in vitro method for purifying or isolating non-circulating cells in a fresh tumor or biopsy sample from a Boreoeutheria to characterize the said non-circulating cells,

wherein said non-circulating cells purification or isolation comprises positively sorting cells that bind to a ligand, wherein said ligand is a (proteinaceous) product of the application.

[0507] According to another particular embodiment, the invention relates to an in vitro method for inducing pluripotent stem cells from somatic cells, which comprises introducing pluripotency-associated genes into somatic cells, and selecting those cells, which express the introduced pluripotency-associated genes,

wherein said pluripotency-associated genes comprises a gene coding for a polypeptide, which consists of the soluble N-terminal ectodomain fragments and (sub-)fragments of (soluble) ectodomain fragments herein defined and/or of the C-terminal protein fragments and C-terminal ectodomain fragments herein defined.

### EXAMPLES

### Example 1

[0508] Capture of retroviral envelope genes has been pivotal to the emergence of placental mammals, with evidence for multiple, reiterated and independent capture events occurring in mammals and responsible for the diversity of present-day placental structures. Here we uncover a full-length endogenous retrovirus envelope protein with unprecedented characteristics as it is actively shed in the blood circulation in humans, via specific cleavage of the precursor envelope protein upstream of the transmembrane domain. At variance with previously identified retroviral envelope genes, its encoding gene is found to be transcribed from a unique CpG-rich promoter not related to a retroviral LTR, with sites of expression including the placenta as well as other tissues, and rather unexpectedly stem cells as well as reprogrammed iPS cells where the protein can also be detected. We provide evidence that the associated retroviral capture event most probably occurred >100 Mya, before the split of Laurasiatheria and Euarchontoglires, with the identified retroviral envelope gene encoding a full-length protein in all simians, under purifying selection and with similar shedding capacity. Finally a comprehensive screen of the expression of the gene discloses high transcript levels in several tumor tissues such as germ cell, breast and ovarian tumors, with in the latter case evidence for a histotype dependence and specific protein expression in clear-cell carcinoma. Conclusively, the identified protein is likely to constitute a “stemness marker” of the normal cell, and a “target” for immunotherapeutic approaches in definite tumors.

### Significance

[0509] Endogenization of retroviruses is a rare but common event in vertebrates, with the captured retroviral envelope syncytins playing a major role in placentation in mammals—including marsupials. Here we identify an endogenous retroviral envelope protein with unprecedented properties, including a specific cleavage process resulting in the shedding of its extracellular moiety in the human blood circulation. This protein is conserved in all simians—with a homologous protein found in marsupials—with a “stemness” expression in embryonic and reprogrammed stem cells, as well as in the placenta and some human tumors, especially ovarian tumors. This protein is likely to constitute a versatile marker—and possibly an effector—of specific cellular states, and, being shed, can be immuno-detected in the blood.

### Methods

### Biological Samples

[0510] First trimester human placenta tissues were obtained from legal elective terminations of pregnancy (gestational age 8 to 12 weeks), with parent's written informed consent, from the Department of Obstetrics and Gynecology at the COCHIN Hospital, Paris 75014, France.

[0511] All blood samples were obtained with written informed consent. Samples from pregnant (11 to 18 weeks of amenorrhea) and non-pregnant (before ovulation induction hormonal therapy) women were from Laboratoire EYLAU (34, avenue du Roule; 92200 Neuilly sur Seine; France) under MTA protocol MTA2015-45. Male blood samples were from ETABLISSEMENT FRANÇAIS DU SANG (20 Avenue du Stade de France; 93218 Saint-Denis; France) under agreement 15EFS018.

[0512] Ovary tissue samples were from the Biological Resource Centre and the Department of Laboratory Medicine and Pathology of the GUSTAVE ROUSSY INSTITUTE (114, rue Edouard Vaillant; 94800 Villejuif; France) under Research Agreement RT09916.

[0513] RNAs from hESC (H1, H7, H9) were from U1170-INSERM of the GUSTAVE ROUSSY INSTITUTE.

[0514] iPSC (reprogrammed CD34+ human cells, at passage 24) and their supernatant were from the iPSC Platform of the GUSTAVE ROUSSY INSTITUTE.

[0515] The source of non-human primate genomic DNAs is described in Esnault et al. 2013, and the source of Wallaby RNA in Cornelis et al. 2015.

### Ethics Statement

[0516] Experiments were approved by the Ethics Committee of the GUSTAVE ROUSSY INSTITUTE. This study was carried out in strict accordance with the French and European laws and regulations regarding Animal Experimentation (Directive 86/609/EEC regarding the protection of animals used for experimental and other scientific purposes).

### Polyclonal and Monoclonal Anti-HEMO Antibodies

[0517] A DNA fragment coding for 163 amino acids of the HEMO SU envelope subunit (aa 123 to 286; SEQ ID NO: 8) was inserted into the pET28b (NOVAGEN) prokaryotic expression vector and expressed in BL21(DE3) bacteria. The recombinant C-term-His-tagged protein was purified from bacteria lysates by nickel affinity chromatography. Mice immunization was performed in accordance with standard procedures. Sera containing polyclonal antibodies were recovered independently from 10 mice and tested by Western blot analyses using lysates of 293T cells transiently transfected with HEMO Env expression vector. One mouse was selected for monoclonal antibody production by AGRO-BIO (2 allée de la Chavannerie; 45240 La Ferté Saint-Aubin; France), and one hybridoma clone was isolated (2F7, IgG2a isotype) for IgG production.

### Database Screening and Sequence Analyses

[0518] Retroviral endogenous env gene sequences were searched by BLAST® on the human genome (GRCh38/hg38 Genome Reference Consortium Human Reference 38 (GCA_000001405.15), December 2013). First, all genomic sequences containing an ORF longer than 400 aa (from start to stop codons) were extracted from the hg38 human database using the GETORF program of the EMBOSS package (http://emboss.sourceforge.net/apps/cvs/emboss/apps/getorf.html) and translated into amino acid sequences. These amino acid sequences were then BLASTed against the SU-TM amino acid sequences of 42 retroviral envelope glycoproteins (from representative ERVs among which are known syncytins, and infectious retroviruses), using the BLASTP program of the National Center for Biotechnology Information (NCBI®; www.ncbi.nlm.nih.gov/BLAST). Positive envelope-containing ORFs were classified by multiple alignments of their amino acid sequences using the ClustalW protocol (www.ebi.ac.uk). ORFs consisting of highly repetitive sequences were discarded.

[0519] Maximum-likelihood phylogenetic trees were constructed with RaxML 7.3.2, with bootstrap percentages computed after 1,000 replicates using the GAMMA+GTR model for the rapid bootstrapping algorithm.

[0520] Sequences were analyzed using various platforms and softwares: UCSC browser of the Santa Cruz University of California (https://genome.ucsc.edu/); REPBASE (http://www.girinst.org/repbase/); REPEATMASKER (http://www.repeatmasker.org); DFAM of the University of Montana (http://www.dfam.org/); EMBOSS® softwares at the CBiB-Bordeaux, France (http://services.cbib.u-bordeaux.fr/galaxy/), prediction servers at (http://www.cbs.dtu.dk/services/) and (http://www.expasy.org/) and NEWCPGREPORT for CpG island characterization at (http://www.ebi.ac.uk/Tools/emboss/).

[0521] dN/dS ratios were obtained with the PAML program package, on the PAMLX graphical user interface (version 1.2). Coordinates of the selected HEMO ORF sequences are listed in Table 2 below. The gibbon, baboon, spider monkey and saki nucleotide HEMO ORF were PCR-amplified as indicated below, and the sequences deposited in GEN BANK®.

[0522] Syntenic loci were recovered for a representative number of species from the UCSC browser, on a 250 kb genomic region located between two genes conserved in all species, 5′ and 3′ to the HEMO locus, namely RASL11B and USP46. They were analyzed using the MULTIPIPMAKER alignment tool (http://pipmaker.bx.psu.edu/pipmaker/), with the human genome sequence as a reference. Coordinates of the selected sequences are listed in Table 3 below.

TABLE 2
List of genomic coordinates of the simian HEMO ORF sequences

| Species | Assembly | Coordinates |
|---|---|---|
| Human | GRCh38/hg38, 2013 | chr4: 52,743,829-52,745,520 |
| Chimpanzee | CSAC 2.1.4/panTro4 | chr4: 77,303,213-77,304,904 |
| Gorilla | gorGor4.1/gorGor4, 2014 | chr4: 76,069,071-76,070,762 |
| Orangutan | WUGSC 2.0.2/ponAbe2, 2007 | chr4: 67,458,017-67,459,708 |
| Gibbon | deposited | |
| Macaque | BCM Mmul_8.0.1/rheMac8, 2015 | chr5: 82,025,079-82,026,770 |
| Baboon | deposited | |
| AGM | Chlorocebus_sabeus 1.1/chlSab2, 2014 | chr7: 15,740,103-15,741,791 |
| Colobus angolensis palliatus | Cang.pa_1.0 | Scf473: 131,759-473,133,450 |
| Langur | deposited | |
| Marmoset | WUGSC 3.2/calJac3, 2009 | chr3: 140,763,785-140,765,366 |
| Rhinopithecus roxellana | isolate Xiao Hai Rrox_v1 | ENSRROG025365: 167,098-168,786 |
| Squirrel monkey | Broad/saiBol1, 2011 | JH378162: 9,809,510-9,811,090 |
| Spider monkey | deposited | |
| Saki monkey | deposited | |
| Cat | ICGSC/Felis_catus_8.0/felCat8, 2014 | chrB1: 164,136,405-164,138,141 |

TABLE 3
List of genomic coordinates of the 250 kb RAS-USP46 locus

| Species | Assembly | Coordinates |
|---|---|---|
| EUARCHONTOGLIRES | | |
| Human (Simian-Ape) | GRCh38/hg38, 2013 | chr4: 52,590,972-52,866,835 |
| Chimpanzee-Bonobo (Simian-Ape) | Max-Planck/panPan1, 2012 | JH650087: 949069-1220194 |
| Rhesus macaque (Simian-OWM) | BCM Mmul_8.0.1/rheMac8, 2015 | chr5: 81,899,847-82,185,019 |
| Marmoset (Simian-NWM) | WUGSC 3.2/calJac3, 2009 | chr3: 140669174-140925562 |
| Tarsier (Prosimian) | Tarsius_syrichta-2.0.1/tarSyr2, 2013 | KE926088v1: 194120-271011 |
| | | KE938719v1: 458231-525407 |
| Mouse Lemur (Prosimian) | Mouse lemur/micMur2, 2015 | KQ053245v1: 1118456-1287657 |
| Colugo (Dermoptera) | G_variegatus-3.0.2 | scaffold969: 20581-246600 |
| Mouse (Rodentia) | GRCm38/mm10, 2011 | chr5: 74000038-74199471 |
| Guinea Pig (Rodentia) | Broad/cavPor3, 2008 | scaffold_24: 23257653-23479169 |
| Rabbit (Lagomorpha) | Broad/oryCun2, 2009 | chrUn0056: 1207035-1383532 |
| LAURASIATHERIA | | |
| Hedgehog (Insectivora) | EriEur2.0/eriEur2, 2012 | JH835325: 6037893-6282794 |
| Cow (Ruminantia) | Bos_taurus_UMD_3.1.1/bosTau8, 2014 | chr6: 69950422-70183806 |
| Horse (Perissodactyla) | Broad/equCab2, 2007 | chr3: 79263527-79467858 |
| Dog (Carnivora) | Broad/CanFam3.1/canFam3, 2011 | chr13: 45379782-45583929 |
| Cat (Carnivora) | ICGSC/Felis_catus_8.0/felCat8, 2014 | chrB1: 164058766-164262324 |
| AFROTHERIA | | |
| Elephant (Proboscidae) | Broad/loxAfr3, 2009 | scaffold_38: 3843013-4119717 |
| Tenrec (Tenrecidae) | Broad/echTel2, 2012 | JH980315: 5379386-5641477 |
| XENARTHRA | | |
| Armadillo (Dasypodidae) | Baylor/dasNov3, 2011 | JH568349: 4112648-4401060 |
| MARSUPIAL | | |
| Opossum (Didelphimorphia) | Broad/monDom5, 2006 | chr5: 173087922-173327904 |

Cell Culture, 5-Aza-2′-deoxycytidine Treatment and Metalloprotease Inhibitors

[0523] Cells were maintained at 37° C., 5% CO2 in DULBECCO'S MODIFIED EAGLE MEDIUM for 293T (embryonic kidney), HeLa (cervix adenocarcinoma), CaCo-2 (colon adenocarcinoma), TE671 (rhabdomyosarcoma), SH-SY5Y (neuroblastoma) and HuH7 (hepatoma) human cells, in RPMI Media 1640, for JAR (choriocarcinoma), 2102Ep (teratocarcinoma) and NCCIT (teratocarcinoma) human cells, and in F-12K Medium for BeWo (choriocarcinoma), JEG-3 (choriocarcinoma) and NTera2D1 (teratocarcinoma) human cells. All media were supplemented with 10% heat-inactivated fetal calf serum (FCS), 100 U/ml penicillin, and 100 μg/ml streptomycin (all reagents are from LIFE TECHNOLOGY). iPSC were grown on irradiated MEFs at the GUSTAVE ROUSSY iPSC-platform. When reaching confluence, cells were serum-deprived for 36 hours and supernatant was harvested, filtered (0.22 μm Millipore filters) and concentrated 20-fold on AMICON Ultra 0.5 mL (MILLIPORE, 10K).

[0524] For treatment with 5-Aza-2′-deoxycytidine (5-Aza-dC; SIGMA-ALDRICH), 2×105 BeWo and 293T cells were plated in 6-well dishes. Doses ranging from 0.1 to 5 μM of 5-Aza-dC were then added to the culture for 3 days, with fresh medium each day. Cells were harvested for RNA extraction one day later.

[0525] For treatment with metalloprotease inhibitors, 5×105 293T cells were seeded in 6-well dishes with 2 mL/well of culture medium. One day after seeding, cells were transiently transfected using 1.5 μg phCMV-HEMO plasmid and 4.5 μL Lipofectamine LTX (THERMOFISHER) per well. One day post-transfection, cells were incubated with culture medium supplemented with the indicated concentrations of metalloprotease inhibitors (CALBIOCHEM): BATIMASTAT (0.1 to 10 μM), MARIMASTAT (0.1 to 10 μM) or GM6001 (1 to 50 μM). Medium with inhibitors was replenished for 2 other days, and supernatants were collected and filtered through 0.45 μm MILLIPORE filters one day later. Cells were harvested the same day for protein analysis.

### Luciferase Promoter Assay

[0526] For HEMO promoter activity assay, fragments of different sizes containing the TSS (+1) were PCR-amplified from human genomic DNA, and cloned in sense and antisense orientation, into the HindIII-NheI sites of the pGL3 Basic vector (PROMEGA) upstream of the luciferase reporter gene (757 bp fragment: from −290 to +472; 467 bp fragment: from +1 (TSS) to +472; 408 bp fragment: from +57 to +472; primers used are listed in Table 4 below, with (NNN) representing HindIII and NheI sites).

[0527] 293T cells were seeded in 96-well dishes with 2×10⁴ cells per well. One day after seeding, cells were transfected with 100 ng DNA plasmid and 0.2 μL JETPRIME® (POLYPLUS TRANSFECTION; 850 boulevard Sébastien Brant; 67400 Illkirch; France). Two days post-transfection, culture medium was discarded and the activity of luciferase was detected using the PIERCE™ RENILLA-Firefly Luciferase Dual Assay Kit and the GLOMAX®-Multi+ Luminescence Apparatus (PROMEGA) following the manufacturer's instructions.

TABLE 4
list of primers

| Primer names | Primer sequences |
|---|---|
| qRT-PCR | |
| hemo-F1 | 5′-ACTATGGGCTCCCTTTCAAACT (SEQ ID NO: 77) |
| hemo-R1 | 5′-CATAGGAGGAAGTAGAGTGATT (SEQ ID NO: 78) |
| RPLP0-F | 5′-GGCGACCTGGAAGTCCAACTA (SEQ ID NO: 79) |
| RPLP0-R | 5′-CCATCAGCACCACAGCCTTC (SEQ ID NO: 80) |
| G6PD-F | 5′-TGCAGATGCTGTGTCTGG (SEQ ID NO: 81) |
| G6PD-R | 5′-CGTACTGGCCCAGGACC (SEQ ID NO: 82) |
| RACE experiments | |
| hemo-5′-RACE-R | 5′-CCTTGGGAGGTCCTAGTGCTAAGTGC (SEQ ID NO: 83) |
| hemo-3′-RACE-F | 5′-AAGCCACAGGAAGCTAGATTGAGATCAT (SEQ ID NO: 84) |
| hemo-R2 | 5′-GCTGTCTACTTCATCTGCTCAT (SEQ ID NO: 85) |
| hemo-R4 | 5′-CCGCAGACGTAGACAACGAA (SEQ ID NO: 86) |
| hemo-F4 | 5′-TTTCAAATAGGGCAATGAAGG (SEQ ID NO: 87) |
| panMars-5′-RACE-R | 5′-CATCTGTCCTCTGGAACATCGCCCAAG (SEQ ID NO: 88) |
| panMars-R2 | 5′-TCAGTTTCCATATTACCCACTT (SEQ ID NO: 89) |
| panMars-R3 | 5′-CAAGGAGTGAACTGAAGTGG (SEQ ID NO: 90) |
| panMars-R4 | 5′-ATTCGTCAGAACAACCCAATAG (SEQ ID NO: 91) |
| Bisulfite experiments | |
| Fragment I | I-F 5′-AGGTAGGTAGTGGATATAGGTG (SEQ ID NO: 92) |
| | I-R 5′-AAACCAAAAAACCAAAAAAA (SEQ ID NO: 93) |
| Fragment I Nested | I-F2 5′-GTAGTGGATATAGGTGGTT (SEQ ID NO: 94) |
| | I-R2 5′-AAACCAAAAAACCAAAAAAAAAAC (SEQ ID NO: 95) |
| Fragment II | II-F 5′-TTTTTTTTTTGGTTTTTTGG (SEQ ID NO: 96) |
| | II-R 5′-ATCTACCCTAAAAAACAAA (SEQ ID NO: 97) |
| Fragment II Nested | II-F2 5′-TTTTTTTTTTGGTTTTTTGG (SEQ ID NO: 98) |
| | II-R2 5′-AAAAAACAAAACRCAAACTTATTAC (SEQ ID NO: 99) |
| Amplification of | |
| genomic hemo in | |
| primate species | |
| hemoGe-F-Xho | 5′-ATACATCTCGAGCATTGTCTGGAGTTTGCTTGT (SEQ ID NO: 100) |
| hemoGe-R-Mlu | 5′-ATACATACGCGTGGGTAAGGGTTTACAGATCAG (SEQ ID NO: 101) |
| hemoNWM-R-Mlu | 5′-ATACATACGCGTACACCTTGGGAGGTCCTAGT (SEQ ID NO: 102) |
| Amplification of | |
| promoter fragments | |
| hemo-(−290)F | 5′-(NNN)GTCCTGCCCTCGTCCCGAAG (SEQ ID NO: 103) |
| hemo-(+1)F | 5′-(NNN)CACTTCAGTTCCCGCCGCGA (SEQ ID NO: 104) |
| hemo-(+57)F | 5′-(NNN)GCCAGTTTATCCCTCGGAGTT (SEQ ID NO: 105) |
| hemo-(472)R | 5′-(NNN)CCGCAGACGTAGACAACGAA (SEQ ID NO: 106) |
| Furin site mutation | |
| hemo-RTKR-F | 5′-CACCGCATAGACGCACCAAACGAGACACAGACA (SEQ ID NO: 107) |
| hemo-RTKR-R | 5′-TGTCTGTGTCTCGTTTGGTGCGTCTATGCGGTG (SEQ ID NO: 108) |

### Bisulfite Genomic Sequencing Analysis

[0528] Genomic DNA from 293T, BeWo, iPSC-NP24, and CaCo-2 cells were subjected to bisulfite treatment with the EpiTect Plus DNA Bisulfite Kit (QIAGEN). 2 DNA fragments of the promoter region were amplified via nested PCR (2 rounds of 35 cycles) with ACCUPRIME™ High Fidelity polymerase (INVITROGEN, @THERMO-FISCHER), on 50 to 150 ng bisulfite treated DNA, using specific primers listed in Table 4 above. PCR products were then cloned into pGEMT-Easy vector (PROM EGA) and a minimum of 10 clones were selected for sequencing.

Expression Vectors for the HEMO ORF from Human and Simians and Ex Vivo Assays

[0529] The HEMO ORF from human and selected simians (FIGS. 11A and 11B) were PCR-amplified from the corresponding genomic DNAs using the PHUSION DNA Polymerase (THERMO SCIENTIFIC) with a unique forward primer due to high conservation 5′ to the ATG codon (hemoGe-F-Xho), and one of the two reverse primers (hemoGe-R-Mlu or a specific NWM monkey hemoNWM-R-Mlu primer), see Table 4 above. PCR products were directly sequenced (BIGDYE TERMINATOR v3.1, THERMOFISCHER). The amplified HEMO gene fragments were then cloned into the Xho I and Mlu I sites of the phCMV-G expression vector (GENBANK® accession AJ318514), for transfection experiments. Premature stop codon HEMO mutants (FIG. 4) were constructed by inserting a TGA-stop codon in a reverse primer used to PCR-amplify the indicated fragments from phCMV-HEMO, and recloning as above. Substitution of the CTQG sequence by the consensus furin site RTKR (as in the NWM HEMO genes) was performed by site-directed mutagenesis with multiple PCR reactions.

[0530] HEMO protein production and release were assayed using 5×10⁵ 293 T cells transfected with 1.5 μg of phCMV-HEMO plasmid and 7.5 μl Fugene 6 (PROM EGA) in 6-well dishes. Cell media were replaced 12 h post-transfection by serum-free media. Forty-eight hours post-transfection, supernatant and cells were collected. Supernatants were filtered (0.45 μm MILLIPORE filters) and stored at −80° C. For cell lysates, samples were solubilized in RIPA buffer (150 mM NaCl, 25 mM Tris HCl pH 7.6, 0.1% SDS and 1% sodium deoxycholate, THERMO SCIENTIFIC) with 1×-Protease and Phosphatase Inhibitor Cocktail (THERMO SCIENTIFIC), centrifuged (14,000 g for 20 min to eliminate debris), and stored at −80° C. before testing.

### Immunofluorescence and Immunohistochemistry Assays

[0531] For HEMO immunofluorescence assays, Hela cells were grown on glass coverslips, and transiently transfected with the phCMV-HEMO expression vector or a control empty vector (500 ng) and 1.5 μL Lipofectamine LTX (THERMOFISHER) per well of 12-well dishes. Forty-eight hours post-transfection, cells were fixed in 4% paraformaldehyde, permeabilized or not with 0.2% TRITON X100, and stained with the mouse anti-HEMO polyclonal antibody (see above) and an ALEXA Fluor 488-conjugated anti-mouse secondary antibody (MOLECULAR PROBES). Nuclei were stained in blue with DAPI (SIGMA-ALDRICH). Observations were made under a LEICA TCS SP8 MP confocal microscope.

[0532] For immunohistochemistry assays, freshly collected placental tissues were fixed in 4% paraformaldehyde and embedded in paraffin. Sections (4 μm) were stained with hematoxylin eosin and safran. Paraffin sections were processed for heat-induced antigen retrieval (Tris EDTA pH 9, ABCAM) and incubated overnight with the monoclonal mouse anti-HEMO (2F7) antibody (1/10 dilution) or a control IgG2a isotype. Staining was visualized by using the peroxidase/diaminobenzidine Mouse PowerVision kit (IMMUNOVISION TECHNOLOGIES).

### Western Blot Analyses, Wheat Germ Agglutinin Purification and Peptide N-Glycosidase F Treatment

[0533] Samples, cell supernatants or cell lysates were analyzed by SDS/PAGE on gradient precast gels (NuPAGE NOVEX 4-12% Bis-Tris gels, LIFE TECHNOLOGIES), and transfer onto nitrocellulose membranes using a semi-dry transfer system. After blocking in PBS containing 0.1% Tween-20 and 5% nonfat milk, membranes were incubated overnight at 4° C. with primary antibodies (anti-HEMO mouse polyclonal antibody 1/5000, anti-CGB/hCG-beta rabbit polyclonal antibody (ABGENT) 1/100000, anti-γ-tubulin mouse monoclonal antibody (SIGMA-ALDRICH) 1/1000), washed 3-times and then incubated with species-appropriate horseradish peroxidase (HRP)-conjugated secondary antibodies for 45 min at RT. Proteins were detected by using an enhanced chemiluminescence system (ECL, PIERCE).

[0534] When specified, glycoproteins were first extracted from placental tissue or sera, using the lectin wheat germ agglutinin (WGA) kit (THERMO SCIENTIFIC). Six hundred microliters of whole protein extracts were prepared according to the manufacturers' guidelines and eluted in 200 μl elution buffer. When specified, samples were treated with peptide N-glycosidase F (PNGase F; NEB BIOLABS) before SDS-PAGE.

### Mass Spectrometry Characterization of the N- and C-Termini of the HEMO Protein

[0535] To get sufficient amounts of HEMO protein for MS characterization, 293T cells (4 10-cm dishes with 3×10⁶ cells/dish) were transfected with the phCMV-HEMO expression vector (from human), in DMEM-FCS medium (10 μg per plate). Medium was replaced by serum-free DMEM 2 days later, and supernatants recovered after 2 more days. Total secreted proteins were concentrated about 60-fold using VIVASPIN 20 (SARTORIUS, 30,000 MWCO PES). Glycoproteins from the concentrated extract were recovered using the WGA-kit, eluted in 200 μL, and loaded on a 4-12% NuPAGE gel. The 80 kDa part of the acrylamide gel was excised and proteins eluted in a dialysis bag electrophoretically. Proteins were again concentrated using AMICON Ultra Centrifugal Filters (ULTRACEL-50K), treated with PNGase and re-loaded on a 4-12% NuPAGE gel for an additional purification step. The main band (seen upon Coomassie Blue staining and corresponding to the shed 48 kDa HEMO protein) was excised and subjected independently to different enzymatic digestions (Trypsin, Chymotrypsin). The shed HEMO protein associated fragments were characterized by the IMAGIF platform of Gif-sur-Yvette (France), by nanoLC-MS/MS analyses with a Triple-TOF 4600 mass spectrometer (AB Sciex, Framingham, Mass., USA), thus allowing the determination of the N- and C-termini of the protein.

### RNA, Real-Time RT-PCR and RACE Experiments

[0536] Total RNAs from human tissues and cells were either purchased from ZYAGEN (San Diego), or isolated using the RNAeasy Isolation Kit (QIAGEN) according to the manufacturer's instructions, and treated with Dnase I (AMBION). Reverse transcription was performed with 1 μg of RNA using the MLV reverse-transcriptase (APPLIED BIOSYSTEMS). Real-time quantitative PCR was carried out with 5 μl of diluted (1:20) cDNA in a final volume of 25 μl by using SYBR green PCR master mix (QIAGEN). qPCR was carried out with an ABI Prism 7000 sequence detection system, using primers listed in Table 4 above. Transcript levels were normalized relative to the amount of a housekeeping gene (RPLPO or G6PD) mRNA. Samples were assayed in duplicate.

[0537] 5′-RACE and 3′-RACE were performed with 100 ng of DNase-treated RNA using the SMARter RACE cDNA Amplification Kit (CLONTECH), and the primers listed in Table 4 above.

### RNA-Seq Data Mining

[0538] RNA-seq raw data were downloaded from NCBI® Sequence Read Archive (SRA) with Accession numbers: SRP011546 (GSE36552), ERP003613 (PRJEB4337) and SRP042153 (GSE57866). RNA-seq raw data were aligned with TOPHAT2 (v2.0.14) to a custom gene database of interest, including some retroviral envelope and housekeeping genes, with the following parameters: “--read-mismatches 0 -g 1 --no-coverage-search”. Uniquely mapped reads were selected using SAMtools (v0.1.19) for further analysis. Only hits with exact matches were counted in order to avoid detection of other analogous ERV genes. Read counts were normalized by the length of the gene (after merging in kilobases) and by the read counts of two housekeeping genes (RPLPO and RPS6) and log transformed. Specific transcripts of the gene (absence of read counts in intronic and flanking sequences, and presence of split RNA-seq reads corresponding to specific splice junctions) were also verified by blast on the NCBI®-Trace Archive Nucleotide BLAST® platform. For each gene of interest, read counts were verified to be equally distributed over the coding sequence, on the Integrative Genomics Viewer visualization tool (http://software.broadinstitute.org/software/igv).

### Microarray Data Mining

[0539] To get insight into the expression profile of the HEMO gene in normal and tumoral human tissues, an in silico analysis of microarray data was performed, using the dataset E-MTAB-62 elaborated in Lukk et al. 2010 (https://www.ebi.ac.uk/arrayexpress/experiments/E-MTAB-62/files/), which includes 1033 samples from normal tissues and 2315 neoplasm samples, obtained from various AE and Gene Expression Omnibus (GEO) studies. The dataset E-MTAB-62 was downloaded as processed expression data. Statistical significance was assessed using Wilcoxon's rank sum test. For larger panel analyses, additional ovarian cancer datasets (AE E-GEOD-63885, E-GEOD-30311, E-GEOD-54809, E-GEOD-6008, E-GEOD-14764, from https://www.ebi.ac.uk/arrayexpress) were pre-processed using the “expresso” function of the affy package (v1.48.0) (Gautier et al. 2004), with the following parameters: robust multiarray average (RMA) for background correction, keeping only the perfect match (PM) probes (“pmonly”), and quantile normalization. Both “medianpolish” and “avgdiff” were applied as summarization methods, in order to have normalized values in both log 2-transformed values and probeset intensities log 2-transformed values. After data pre-processing, the expression values of the HEMO gene was extracted and plotted with R 3.2.3 (www.r-project.org). The ovarian cancer datasets were merged using the inSilicoMerging R package (Taminau et al. 2012) (version 1.14), applying COMBAT as batch effect correction method.

### Results

### Identification of HEMO, an HERV Env Gene Encoding a Full-Length Protein

[0540] The most recent human genome sequence release (GRCh38 Genome Reference Consortium Human reference 38, December 2013) was screened for the presence of genes encoding full-length ERV Env proteins by a BLAST search for ORFs (from the Met start codon to the stop codon) >400 aa, using a selected series of 42 Env sequences representative of both infectious retrovirus and ERV families, including all the previously identified syncytins (Methods). It yielded 45 Env-encoding ORF, which could be, for all except one, grouped by clustalW alignments into already known HERV Env families (among which 24 Env-encoding ORFs for HERV-K, and 20 Env-encoding ORFs belonging to the set of 12 previously described HERV Envs, see Table 5 below).

TABLE 5
Human Envelope protein coding sequences genomic coordinates

| | Name | Length | Coordinates |
|---|---|---|---|
| ENV GAMMA-type | EnvW | 538aa | chr7: 92468768-92470381 (REVERSE SENSE)) |
| | EnvW-like | 475aa | (chrX: 107052509-107053933 (REVERSE SENSE)) |
| | EnvW-like | 472aa | (chr20: 55351277-55352692) |
| | EnvW-like | 468aa | (chr4: 72926505-72927908 (REVERSE SENSE)) |
| | EnvFRD | 538aa | (chr6: 11103697-11105310 (REVERSE SENSE)) |
| | EnvERV3 | 604aa | (chr7: 64991215-64993026 (REVERSE SENSE)) |
| | EnvERV3-like | 406aa | (chrX: 52569735-52570952 (REVERSE SENSE)) |
| | EnvE | 428aa | (chr19: 20748111-20749394 (REVERSE SENSE)) |
| | EnvV1 | 477aa | (chr19: 53014091-53015521) |
| | EnvV2 | 535aa | (chr19: 53049252-53050856) |
| | EnvH1 | 584aa | (chr2: 165708193-165709944 (REVERSE SENSE)) |
| | EnvH2 | 563aa | (chr3: 166823237-166824925 (REVERSE SENSE)) |
| | EnvH3 | 555aa | (chr2: 154872220-154873884) |
| | EnvH-like | 474aa | (chrX: 72228564-72229985) |
| | EnvPb | 665aa | (chr14: 92622888-92624882 (REVERSE SENSE)) |
| | EnvRb | 514aa | (chr3: 16770303-16771844) |
| | EnvFc1 | 584aa | (chrX: 97847263-97849014) |
| | EnvFc2 | 527aa | (chr7: 153409531-153411111 (REVERSE SENSE)) |
| | EnvT | 626aa | (chr19: 20369432-20371309) |
| | EnvT-like | 427aa | (chr14: 106197668-106198948 (REVERSE SENSE)) |
| | EnvHEMO | 563aa | (chr4: 52743832-52745520 (REVERSE SENSE)) |
| ENV BETA-type | Env-K-like | 412aa | (chr16: 10418516-10419751 (REVERSE SENSE)) |
| | Env-K-like | 439aa | (chr1: 242457592-242458908) |
| | Env-K-like | 475aa | (chr5: 34462280-34463704 (REVERSE SENSE)) |
| | Env-K-like | 482aa | (chr16: 2661368-2662813 (REVERSE SENSE)) |
| | Env-K-like | 487aa | (chr11: 118722384-118723844 (REVERSE SENSE)) |
| | Env-K-like | 550aa | (chr16: 34413088-34414737 (REVERSE SENSE)) |
| | Env-K-like | 550aa | (chr16: 34997093-34998742) |
| | Env-K-like | 560aa | (chr1: 160697328-160699007) |
| | Env-K-like | 588aa | (chr1: 75380770-75382533) |
| | Env-K-like | 597aa | (chr3: 113025711-113027501 (REVERSE SENSE)) |
| | Env-K-like | 658aa | (chr12: 105311338-105313311) |
| | Env-K-like | 661aa | (chr11: 101701507-101703489) |
| | Env-K-like | 687aa | (chr2: 129962883-129964943 (REVERSE SENSE)) |
| | Env-K-like | 698aa | (chr12: 58328384-58330477 (REVERSE SENSE)) |
| | Env-K-like | 698aa | (chr6: 77717862-77719955 (REVERSE SENSE)) |
| | Env-K-like | 699aa | (chr7: 4583351-4585447 (REVERSE SENSE)) |
| | Env-K-like | 699aa | (chr7: 4591855-4593951 (REVERSE SENSE)) |
| | Env-K-like | 699aa | (chr8: 7498800-7500896 (REVERSE SENSE)) |
| | Env-K-like | 699aa | (chr19: 27638542-27640638 (REVERSE SENSE)) |
| | Env-K-like | 738aa | (chr3: 101696851-101699064) |
| | Env-K-like | 885aa | (chr3: 185564943-185567597 (REVERSE SENSE)) |
| | Env-K-like | 930aa | (chr5: 156659966-156662755 (REVERSE SENSE)) |
| | Env-K-like | 1171aa | (chr22: 18943415-18946927) |
| | Env-K-like | 1375aa | (chr1: 155627591-155631715 (REVERSE SENSE)) |

[0541] Yet, an unrelated env gene (HEMO, for Human Endogenous MER34 ORF) can be identified (see FIG. 1) with a full-length 563 amino acid ORF displaying some—but not all—of the characteristic features of a bona fide retroviral Env protein, namely a signal peptide, a CWLC motif in the putative SU subunit and a C-X6-CC motif in the putative TM subunit, a 23 aa hydrophobic domain located in the TM transmembrane domain, and an ISD domain. Noteworthily, the putative HEMO protein lacks a clearly identified furin cleavage site (CTQG instead of the canonical R/K-X-R/K-R), as well as an adjacent hydrophobic fusion peptide (FIG. 1B). The HEMO sequence was incorporated into the Env phylogenetic tree shown in FIG. 1D, containing the 42 retroviral envelope aa sequences used for the genomic screen. The figure shows that the sequence most closely related to the HEMO protein is Env-panMars, encoded by a conserved, ancestrally captured retroviral env gene found in all Marsupials, and which has a premature stop codon upstream of the transmembrane domain (FIG. 12A-E).

[0542] Finally, BLAST analysis of the human genome indicates that the HEMO gene is part of a very old degenerate multigenic family known as MER34 (for MEdium Reiteration frequency family 34, first described in Toth and Jurka 1994). In this family, a MER34-int consensus sequence with a Gag-Pro-Pol-Env retroviral structure and LTR-MER34 sequences have been described and reported in RepBase (Jurka et al. 2005). Genomic blast with the MER34-int consensus sequence could not detect any full length putative ORFs for the gag or pol genes. Among the env sequences of the MER34 family scattered in the human genome (20 copies with >200 bp homology identified by blast, cf. Table 6 below), HEMO is clearly an outlier (1692 bp/563 aa), with all the other sequences containing numerous stop codons, Alu or LINE insertions, and no ORF longer than 147 aa.

TABLE 6
MER34-related env sequences in the human genome

| | | max ORF |
|---|---|---|
| Chromosome | extracted sequences^{a} | bp/aa |
| 2 | 162084066-162086565 (rev) | 195/64 |
| 2 | 110061551-110064050 | 201/66 |
| 2 | 110307369-110309868 (rev) | 195/64 |
| 2 | 208368352-208370851 | 279/93 |
| 3 | 83422568-83425067 (rev) | 213/70 |
| 4 HEMO | 52743421-52745920 (rev) | 1692/563 |
| 6 | 24704890-24713439 (rev) | 168/55 |
| 7 | 123922822-123925321 (rev) | 156/51 |
| 8 | 59785528-59788027 | 297/98 |
| 8 | 88712235-88714734 | 339/112 |
| 9 | 11114167-11116166 | 243/80 |
| 11 | 102483445-102485944 | 249/82 |
| 12 | 54733146-54735645 | 189/62 |
| 14 | 70462086-70464585 | 150/49 |
| 14 | 70237764-70240263 (rev) | 228/75 |
| 14 | 53023713-53026212 | 369/122 |
| 15 | 5078981-5081480 (rev) | 387/128 |
| 22 | 23932542-23935041 | 444/147 |
| 22 | 23938277-23940776 (rev) | 324/107 |
| X | 43460042-43462541 | 111/36 |

^{a}correspond to genomic sequences sorted out by BLAST with the MER34-env consensus (Repbase MER34-int, bp 6555-8207), and with >200 bp homology

### The HEMO Gene Locus and Transcription Profile

[0543] The HEMO gene is located on chromosome 4q12, between the RASL11B and USP46 genes, at about 120 kb from each gene (see also FIG. 10). Close examination of the HEMO env gene locus (10 kb), by BLAST comparison with the RepBase MER34-int consensus (Jurka et al. 2005), reveals only remnants of the retroviral pol gene in a complex scrambled structure (see FIG. 2A) with part of it being in reverse orientation and further disrupted by numerous Alu (SINE) insertions. The locus organization indicates low selection pressure for the proviral non-env genes, as often observed in the previously characterized loci harboring captured envs.

[0544] A quantitative RT-PCR (RT-qPCR) analysis using primers within the identified ORF and RNAs from a panel of human tissues and cell lines (FIG. 2B) shows that HEMO is expressed at a high level in the placenta. It is also significantly expressed in the kidney but at a lower level. In cell lines, expression of the HEMO gene looks heterogeneous, except for its systematic expression in stem cells (ESC and iPSC). Quite unexpectedly there is an absence of detectable transcripts in several placental choriocarcinoma cell lines (BeWo, JAR, JEG-3), as well as in a series of embryonal carcinoma (NT2D1, 2102Ep, NCCIT) and tumor cell lines (but see the CaCo-2 colon adenocarcinoma).

[0545] The structure of the HEMO env transcripts was determined by RACE-PCR analysis of Env-encoding transcripts from the placenta. It allowed the identification of multiply-spliced transcripts, with the intron boundaries corresponding to donor/acceptor splice sites predicted from the genomic sequence and, as classically observed for retroviral env genes, a functional acceptor site located close to the env ATG start site. Interestingly, the transcript 3′-end falls within an identifiable MER34 LTR, as expected for a retroviral transcript. Yet, the transcription start site, located approximately 5 kb 5′ to the env gene, does not correspond to any identifiable LTR structure. Rather, the sequence associated with the transcript start site is located in a CpG-rich domain (FIGS. 2A and 2C), and most probably corresponds to a cellular promoter unrelated to any retroviral element. The transcript 5′-end, i.e. tc|ACTTC, falls within a canonical RNA Polymerase II Core Promoter Initiator Motif (yy|ANWYY).

[0546] The CpG-rich start site containing region (CpG island, reviewed in Deaton and Bird 2011) was studied further for its promoter activity by ex vivo transfection assays, using luciferase reporter genes. As illustrated in FIG. 2D, a 760 bp fragment including the identified start site acts as a strong promoter in this assay (>500 fold compared to none). Lower expression is observed (10 to 50 fold compared to none) in partial deletion mutants and, as expected for a CpG promoter, when placed in antisense orientation.

[0547] DNA methylation patterns of sequences surrounding the transcription start site within the identified CpG island were analyzed by bisulfite treatment. As shown in FIG. 2E, the majority of the CpGs are methylated in the HEMO-negative cell lines (293T, BeWo), whereas they are unmethylated in HEMO-expressing cell lines (iPSC and CaCo-2). To get further insight into this dependence of the promoter activity on the CpG island methylation pattern, 5-Aza-2′-deoxycytidine (5-Aza-dC) treatment was performed on BeWo and 293T cells at doses ranging from 0.1 to 5 μM (FIG. 2F). Transcripts were detectable by qRT-PCR after a 3-day treatment, at low dose for BeWo cells (0.1 μM), and higher dose for 293T cells (5 μM). Of note, the high transcript level of the HEMO gene in CaCo-2 cells was not further amplified by a similar 5-Aza-dC treatment. Altogether these results indicate that HEMO expression is sensitive to the methylation status of the CpG promoter.

### HEMO Protein Synthesis and Structure: Specific Shedding

[0548] The capacity of the identified gene to produce an envelope protein was tested by introduction of the env ORF into a CMV promoter-driven expression vector, and ex vivo transient transfection assays. Polyclonal and monoclonal antibodies were raised by immunization of mice with a recombinant protein corresponding to a 163 aa fragment of the putative SU moiety of the protein (see Methods). As illustrated by the immunofluorescence assay shown in FIG. 3—upper panel, using the anti-HEMO antibodies, a strong labeling can be observed upon permeabilization of the transfected cells (and not of control cells, transfected with an empty vector). Furthermore, HEMO proteins can be detected at the cell surface, as evidenced by the specific immunofluorescence labelling of the cell membrane of non-permeabilized transfected HeLa cells, in the successive confocal images shown in FIG. 3—lower panel, consistent with HEMO being a retroviral env gene.

[0549] As illustrated in the Western blot of a whole cell lysate (FIG. 4A, lane 3), transfection with the above HEMO expression vector yielded a strong band with an apparent molecular weight >80 kDa, much larger than expected for the HEMO full-length SU-TM protein (theoretical MW 61 kDa), but consistent with its glycosylation—as expected for a retroviral protein. Indeed, treatment of the cell extract with Peptide N-Glycosidase F (PNGase F)—to de-glycosylate proteins—resolved the >80 kDa band into two bands, of lower molecular weight (lane 4): a major band of approximately 58 kDa, and a fainter one of 48 kDa. The major band most probably corresponds to the full-length SU-TM protein (expected size 61 kDa), whereas the lower band has a size inconsistent with that of the sole SU subunit (expected size 37 kDa)—that could be potentially generated by SU-TM cleavage at a furin site (although not canonical in human HEMO (CTQG instead of RXKR, see below).

[0550] Analysis of the cell supernatants provided an unexpected answer as to the origin of the 48 kDa protein. Indeed, this 48 kDa protein turns out to be the major form in the cell supernatant (see FIG. 4A, lane 6, with PNGase F-treatment of the supernatant), whereas the larger 58 kDa band observed in the whole cell extract (FIG. 4A, lane 4, with similar PNGase F-treatment) is almost undetectable, as expected for a cell membrane-attached full-length Env protein (FIG. 4A, lane 6). This secreted 48 kDa protein is glycosylated, being observed at a much higher molecular weight in the cell supernatant without PNGase-F treatment (FIG. 4A, lane 5). Altogether, these data strongly suggest that the HEMO protein, which is a transmembrane protein exported at the cell surface, can nevertheless be quantitatively released—shed—in the supernatant, in the form of a protein whose MW is larger than that of the SU alone. This property, unexpected for a retroviral Env protein, is indeed not observed using the same protocols and expression vectors for syncytin-1 (HERV env-W) used as a negative control (FIG. 4A lanes 1, 2).

[0551] To go further into the characterization of this shed, soluble protein, we purified it from the supernatant of transfected 293T cells (see Method) and characterized its sequence by using Mass Spectrometry (MS) for the determination of both its N- and C-terminus. As illustrated in FIG. 4B, which provides the HEMO protein sequence coverage by MS analysis of trypsin- or chymotrypsin-generated peptides, it turns out that the shed protein is truncated at its C-terminus, mainly at a position located in the ISD domain, with two C-terminal sites identified with a different abundance (namely, Q432 and R433 at a 4 to 1 ratio). At the N-terminus, the HEMO protein begins at position 27, i.e. 2 aa after the predicted signal peptide cleavage site (using SignalP 4.1 Server software, http://www.cbs.dtu.dk/services/SignalP/). To further ascertain the MS size determination of the shed HEMO protein, several mutants were constructed by inserting stop codons at the indicated positions (marked in FIG. 4B, C with asterisks (*): 433R-stop, 472P-stop and 489S-stop) or by introducing a consensus furin site RTKR at the expected position (human furin+ construct, H-fur+). Western blot analysis of the supernatant of the HEMO mutant transfected cells then clearly showed that the wild-type deglycosylated shed HEMO protein migrates as the R433-stop mutant. In addition, and as expected, the H-fur+ mutant displays a smaller 37 kDa band, consistent with the size expected for the deglycosylated SU subunit. Of note, the 472 and 489 stop mutants, although they still contain the shedding site sequence (aa 432/433) but not the transmembrane domain (aa 490 to 512), are simply secreted (and not further processed as the wild-type HEMO protein), suggesting that anchoring the env protein at the cell surface is required for the shedding process.

[0552] To determine if the shed form of the HEMO protein could be observed under in vivo conditions, placental tissues (which show high transcription levels for the HEMO gene, FIG. 2B) were recovered from first trimester legal abortions, together with the local placental blood (which bathes the placental villi and can be analyzed in parallel), and proteins were extracted and deglycosylated for Western blot analyses. As shown in FIG. 4A, lane 7, the small 48 kDa band (and a very faint SU-TM 58 kDa band) can be detected in the placental tissue extract. The 48 kDa band is also detected in the placental blood, most probably corresponding to the protein secreted by the placenta. Mass Spectrometry analysis (as above) of the 48 kDa protein in the corresponding gel bands confirmed the relevance of the immunological detection.

[0553] The release of a processed HEMO protein is reminiscent of what has been observed for the viral envelope protein of a completely unrelated virus, i.e. the Ebola filovirus, for which it has been further demonstrated that cleavage was mediated by a cell-associated ADAM protein (Dolnik et al. 2004). Accordingly, we tested whether chemical inhibitors of metalloproteinases (including the ADAM and MMP proteins, (Dolnik et al. 2004; Okazaki et al. 2012; Weber and Saftig 2012) had any effect on HEMO shedding in 293T transfected cells. As illustrated in FIG. 5, the broad range ADAM and MMP inhibitors BATIMASTAT and MARIMASTAT, and the MMP inhibitor GM6001 clearly inhibited HEMO release in the supernatant, to various extents and in a dose-dependent manner, with visible accumulation of the non-secreted form in the cell lysates. These experiments suggest that, in vivo, HEMO shedding could be driven by one or several metalloproteinases, known to be present notably in placental cells.

### HEMO Expression In Vivo: HEMO Release in the Blood Circulation of Pregnant Women

[0554] The combined results of the RT-qPCRs on the panel of human tissues shown in FIG. 2B and of the shedding of the protein shown in FIG. 4 led us to hypothesize that HEMO could be detected in the blood circulation, especially in pregnant women. Sera were therefore collected and assayed for the presence of shed HEMO by Western blotting. Sera were treated with wheat germ agglutinin (WGA) to isolate glycosylated proteins, which were then deglycosylated. As illustrated in FIG. 6 lower panel, the hCG-beta protein, which is a well-known early biomarker of pregnancy (Cole 2009), shows undetectable levels in the peripheral blood of men and non-pregnant women (lanes 2, 3), whereas a very high level is observed for women on the first trimester of pregnancy (20 kDa band, lanes 4 to 6), with a decrease at later stages (lanes 7 to 12). Remarkably, the de-glycosylated shed HEMO form (48 kDa, previously identified in the placental blood, FIG. 4A lane 8 and FIG. 6 upper panel, lane 1) can also be detected in the peripheral blood of pregnant women, beginning at a faint level in first trimester pregnancies (FIG. 6 upper panel, lanes 4-12). As pregnancy proceeds, the level of HEMO protein increases very significantly, consistent with the large increase in placental mass during pregnancy. HEMO concentration at the peak can be estimated to be in the 1-10 nM range (by comparative Western blot analysis of serial dilutions of a purified recombinant shed HEMO protein), i.e., is about 1 to 2 logs below that for hCG at the peak (T1) and, for further comparison, about the same as that for alpha-fetoprotein in the blood of pregnant women at the peak (T2). Of note, a faint level of shed HEMO protein can also be observed in men and non-pregnant women blood (FIG. 6, upper panel, lane 2 and 3), consistent with its non-negligible expression in other organs such as the kidney (see RTqPCR results in FIG. 2B).

[0555] As illustrated by FIG. 6, bands observed at both higher and lower MW might correspond to minor alternatively processed/shed forms of the HEMO protein (i.e., other than the 27-432/433 fragment; cf. FIG. 1C for the computation of the aa positions; SEQ ID NO: 9; SEQ ID NO: 10). These alternatively processed/shed forms include fragments, which extend from aa position 27 (first aa after signal peptide) up to, and including, an aa position chosen from among positions 450-480 and 380-420 (SEQ ID NOs: 35-55 and 13-23). These other HEMO soluble fragments correspond to cleavage sites n° 2 and n° 3 in FIG. 13 (cleavage site n° 1: aa positions 27 up to 432-433 (main cleavage site); cleavage site n° 2=aa positions 27 up to 450-480; cleavage site no 3=aa positions 27 up to 380-420).

### Identification of HEMO-Producing Cells in the Placenta

[0556] The human placenta is of the hemochorial type and is characterized by the presence of fetal villi in direct contact with—and bathed by—the maternal placental blood (FIG. 7A). These villi arise from the chorionic membrane—of fetal origin—and have an inner mononucleated cytotrophoblast layer (CT) underlying the surface syncytial layer, the syncytiotrophoblast (ST) (reviewed in Bischof et al. 2005; Maltepe and Fisher 2015). The placenta invades the maternal uterine part, with anchoring villi characterised by invasive extravillous trophoblasts (EVT).

[0557] To localize precisely HEMO expression in the placenta, immunohistochemistry experiments were then performed on sections of first trimester placental tissues from abortion cases. As illustrated in FIGS. 7B and 7C, specific staining was obtained with the monoclonal anti-HEMO antibody—and not with a control isotype as shown in panel B (4× magnification). In the four enlargements (60× magnification) shown in panel C—corresponding to the boxed placental villi and chorionic membrane of panel B—, strong staining is observed in the trophoblast cells, including the villous cytotrophoblasts (CT), the extravillous cytotrophoblasts (EVT) and the chorionic membrane trophoblasts, suggesting that HEMO is indeed produced by these cells. More diffuse staining is observed in the syncytiotrophoblast layer (ST), which is generated by CT fusion and is involved in the exchanges between fetal and maternal blood.

[0558] Altogether, the immunohistochemical analyses of the placenta carried out with the above anti-HEMO antibody show strong labeling essentially at the trophoblast level, and are consistent with the observed shedding of HEMO in the mother's blood (FIG. 6).

### Profile of HEMO Expression in Development

[0559] To get insight into the possible involvement of HEMO in embryonic development, we further analyzed by data mining, a series of human RNA-seq experiments deposited at the SRA-NCBI platform, corresponding to different stages of development (Yan et al. 2013; Xue et al. 2013; Friedli et al. 2014; Uhlén et al. 2015). Extraction of the expression profiles of a set of human genes was performed and the results are illustrated in FIG. 8 A-C for the HEMO, the syncytin 1 (Env-W), and the syncytin 2 (Env-FRD) env genes, as well as for specific genes expressed either in the placenta (GCM1) or in stem cells (OCT4/POU5F1). For each gene of interest, read counts were verified to be equally distributed over the coding sequence (see Methods). FIG. 8A clearly shows that HEMO has a wide expression profile, being expressed early in embryonic development, starting at the 8-cell stage up to the late blastocyst stage and being permanently expressed in the derived embryonic stem cells, from passage 0 up to passage 10. The HEMO gene RNA-seq expression profile found in stem cells confirms the RT-qPCR results shown in FIG. 2B and is clearly different from what is observed for the two human syncytin genes: Env-W which is expressed very early in development is completely down-regulated in the human stem cells, and Env-FRD remains almost undetectable. All three env genes (together with the placental GCM1 specific gene) are found in the RNA-seq samples of placental tissues (FIG. 8B), as expected. Finally, RNA-seq expression of HEMO was analyzed in the reprogramming experiments of differentiated somatic cells into iPSCs as described in Friedli et al. 2014, and hits reported in FIG. 8C highlight the specific reprogramming of the HEMO gene—not observed with Env-W and Env-FRD—which parallels the expected profile of expression of the OCT4/POU5F1 transcription factor. Of note, as illustrated in FIG. 8 D at the protein level, we could verify by Western blot analysis of iPSC in culture, that the HEMO gene expression unraveled above also results in the shedding of HEMO proteins, with a 48 kDa band detected in the iPSC supernatants.

[0560] Conclusively, the HEMO gene displays a specific pattern of expression—that includes ES cells—a feature possibly linked to the “capture” of a specific CpG-rich promoter of non-LTR origin, with the bona fide production of HEMO in the form of a soluble protein from at least trophoblast and stem cells.

### HEMO Expression in Tumors

[0561] To get insight into the possible expression of the HEMO gene in human tumors, we performed an in silico analysis of microarray data, using the dataset E-MTAB-62 elaborated in Lukk et al. 2010, which includes 1033 samples from normal tissues and 2315 from neoplasm tissues, obtained from various ArrayExpress (AE) and Gene Expression Omnibus (GEO) studies. In normal tissues, as expected from the RT-qPCR analysis in FIG. 2B, significant levels of expression were essentially observed in placental tissues, and to a limited extent in the kidney (FIG. 9A). In several tumors, as illustrated in FIG. 9B, heterogeneity was detected among samples from the same organ (represented by the outliers plotted as black dots), with in some cases evidence for high level expression of the HEMO gene: for instance in germline, liver, lung or breast tumors, with the most salient heterogeneity being observed for ovary tumors. In the latter case, further search for annotation data related to various histological types of ovarian carcinoma (Cho and Shih 2009; Kurman and Shih 2016), led to correlate the highest values with specific tumor histotypes, mainly Clear Cell Carcinoma.

[0562] To enlarge this data set, ovary tumor samples from 5 other GEO databases were collected and further normalized (see Methods) together with E-MTAB-62, giving a total of 479 tumor samples. As shown in FIG. 9C, higher expression values of the gene are observed for Clear Cell Carcinomas (60 samples) and, to a lesser extent, Endometrioid Cancer samples (96 samples). No clear-cut upregulation of the HEMO gene is observed in Serous Cancer histotype (289 samples, albeit with some heterogenity) and in the Mucinus histotype (34 samples).

[0563] In agreement with these transcription data, immunohistochemistry analyses of normal versus Clear Cell Carcinoma ovarian tissues, using the anti-HEMO monoclonal antibody, disclose a highly specific staining of the tumoral clear cells, as compared to the control isotype staining (FIG. 9D).

### HEMO Insertion Date and Conservation Across Mammalian Genomes

[0564] A strong hint for a physiological role of a captured gene is its conservation in evolution and the nature of the selection to which it is subjected. Accordingly, we performed an extensive search for the HEMO gene in eutherian mammals, both by in silico screening and by PCR-cloning and sequencing, and further extended it to marsupials (the phylogenetic tree in FIG. 1 shows homology of HEMO with env-panMars and see below). These analyses also aimed at the determination of the HEMO date of insertion into the genome of a mammalian ancestor, the determination of the coding capacity of the identified genes in the various species, and in some cases the determination of the presence of a shed HEMO protein after introduction of the cloned gene into an expression vector and transfection of 293T cells. The overall data are summarized in FIG. 10. We performed an in silico analysis of syntenic loci, by using the MultiPipMaker synteny building tool, between the RASL11B and USP46 genes, conserved in all mammalian genomes (and each found at about 120 kb from the human HEMO gene). Focus on the 15 kb HEMO region (FIG. 10A) shows that the HEMO gene entered the genome of mammals before the radiation of Laurasiatherians and Euarchontoglires, i.e. between 100-120 Mya (37), being found neither in Afrotherians (Elephant, Tenrec) nor in Xenarthrans (Armadillo). It also allowed the identification of the orthologous HEMO gene in primates (and as a very degenerate sequence in rodents) and, among Laurasiatherians in a series of ruminants and carnivores. Closer analysis further discloses that the HEMO gene has been conserved as a full-length protein-coding sequence in all simians (FIGS. 11A and 11B), and unexpectedly, in the cat (FIG. 12A-E). The identified full-length HEMO ORFs demonstrate high similarities, ranging from 84 to 99% amino acid identities (FIG. 10B, lower triangle) and show signs of purifying selection, with nonsynonymous to synonymous ratios (dN/dS) between all pairs of species lower than unity (mean value 0.46), except for very close species (e.g. human/chimpanzee) for which the number of mutations is not high enough to provide significant dN/dS values. For example, dN/dS values of 0.29-0.42 are observed between great apes and old world monkeys (OWM; FIG. 10B, upper triangle), as expected for a bona fide cellular gene.

[0565] To test the conservation of the specific shedding property observed in humans, a series of simian HEMO genes were cloned, introduced into the phCMV expression vector and tested by transfection of 293T cells as described above. As shown in FIG. 10C, the HEMO genes from all the tested species encode a protein which can be detected with the human HEMO antibodies (yet with a lower intensity for the distant New World Monkeys (NWM)), with in all cases evidence for protein shedding in the cell supernatant. Even in the NWM branch, where the HEMO protein has retained a functional furin site (see FIGS. 11A and 11B), a shed form of the protein is released in the supernatant, together with a smaller SU form. The smaller size observed for the Spider monkey protein is consistent with a small 10 aa deletion in the 5′ part of the gene (amino acid 182 to 191, FIGS. 11A and 11B). Accordingly, it appears that the shedding of the HEMO protein is a very well conserved property among simians, a feature which, together with the purifying selection applying to this gene, is a hint for a possible role of this secreted protein, notably in pregnant females. Of note, the domains 3′ to the shed protein form are much less conserved at the sequence level among simians, except for the transmembrane anchoring domain most probably required for shedding of the HEMO protein at the cell membrane (see FIGS. 11A and 11B).

### A Related HEMO Gene in Marsupials

[0566] To determine whether HEMO-like sequences could be present in some species where the orthologous gene could not be identified, a less stringent BLAST search was performed, which provided hits in Marsupials—but still neither in Afrotherians nor in Xenarthrans. Of note, the closest env gene identified is a conserved marsupial env gene that we had previously identified (Cornelis et al. 2015), namely env-panMars (see phylogenetic tree in FIG. 1D).

[0567] Amino acid sequence comparison of this conserved marsupial envelope protein with HEMO indicates only 20-30% similarity, but alignment of simian, cat and marsupial (from Opossum, Wallaby and Tasmanian Devil) sequences (FIG. 12A-E) shows significant identity regions, all along the extracellular domains. The env-panMars sequences correspond to truncated env due to a stop codon upstream of the transmembrane domain. The encoded proteins are therefore expected to be soluble proteins. As illustrated in FIG. 12D with HA-tagged env-panMars proteins, the Opossum and Wallaby env proteins are indeed released in the supernatant of cells transfected with the corresponding expression vectors. In the supernatant from Wallaby-transfected cells, a 15 kDa faint band can also be observed, which probably corresponds to the HA-tagged-TM subunit produced after partial cleavage at a degenerate furin site (FHKR). No similar band is observed for the Opossum (sequence at the furin site, VHKP).

[0568] Furthermore, RACE-PCR experiments performed on Wallaby RNA transcripts from ovary (FIG. 12E), locate the transcription start site within a CpG-rich region, with multiply-spliced RNAs in the promoter region, as observed for the HEMO gene. In the case of the Opossum, RNAseq data compiled in UCSC (FIG. 12E) show similar organization (with identical Transcription Start Site, located in a homologous CpG island and the use of the same E3 exon). Altogether, these data could indicate that both simian and marsupial env genes have a common retroviral ancestor, and that they probably correspond to the independent capture of related infectious retroviruses.

### Discussion

[0569] Here we have identified an endogenous retroviral envelope gene, HEMO, with a full-length protein-coding sequence, conserved in simians including humans, and with an unprecedented characteristic feature for a retroviral envelope since it is shed and released in the extracellular medium, being found at a high level in the blood of pregnant women. Several retroviral envelope gene “captures” have been reported, among most mammalian species, and in a number of cases these genes were demonstrated to be “syncytins”, i.e. genes playing a role in placentation, with the canonical immunosuppressive and fusogenic properties inherited from their ancestral retroviral progenitors being involved in a physiological function of benefit to the host (Mangeney et al. 2007; reviewed in Lavialle et al. 2013; Denner 2016). The presently identified HEMO gene shares some of the properties of syncytins, but is different, as it is shed in the extracellular environment with no evidence for fusogenic activity. In addition, its pattern of expression is not strictly restricted to the placenta—although it is the organ where its expression is highest. Yet, its conservation in evolution with characteristic features of a bona fide gene, i.e. evidence for purifying selection, together with the identification of a closely related retroviral env gene captured and conserved in the remote Marsupial clade (which diverged from eutherian mammals more than 150 Mya) sharing with HEMO a CpG-rich promoter and the capacity of its protein product to be released in the extracellular medium (in that case due to a stop codon located just upstream of the transmembrane domain of the TM subunit (Cornelis et al. 2015)), constitute a strong hint for a potential physiological role in simians (see below).

[0570] The identified retroviral env gene belongs to a poorly characterized and moderately reiterated ERV family, namely the MER34 family, with only highly degenerated elements (Vargiu et al. 2016; Toth and Jurka 1994; Jurka et al. 2005). Analysis of the structure of the genomic locus where HEMO can be identified only reveals traces of an ancestral provirus, with a highly rearranged gene organization. Of note, an LTR structure is only barely detectable 3′ to HEMO, and the 5′ LTR is no longer present. Actually, RACE-PCR analysis of the HEMO transcripts reveals a transcription start site within a CpG-rich domain, unrelated to a LTR, but clearly possessing a promoter activity as shown by transfection of reporter plasmids—with the promoter in both orientations—in cells in culture. This unusual promoter is most probably responsible for the specific pattern of expression of the HEMO gene, which is found to be active in a series of stem cells ex vivo, as well as in vivo very early in the developing embryo. The encoded protein itself has some unusual features, since it no longer possesses a furin cleavage site (although a functional one can still be demonstrated for the HEMO ortholog present within the New World Monkey genome), and more importantly because it is specifically cleaved at the cell membrane, via a metalloproteinase-mediated processing that results in the shedding of its ectodomain into the extracellular medium—observed for all simians including New World Monkeys. Shedding is a process that has not been reported previously for a retroviral envelope, although such a process is used by the cellular machinery for a series of cellular genes (e.g. Notch, TNF-alpha) involved for instance in signaling, cell mobility and migration. Of note, a closely related molecular event also takes place in the case of the Ebola filovirus envelope protein, which is in part shed in the cell medium by a specific ADAM-mediated cleavage upstream of the transmembrane domain. In that case also, the shed protein is detected in the blood, and is anticipated to play a critical role in the associated pathology, either by exerting a decoy effect on anti-Env antibodies, or even through direct immune activation and increased vascular permeability in the infected individuals. The presently observed shedding of the HEMO retroviral envelope protein de facto makes a link between unrelated viruses (e.g. a filovirus and a retrovirus). At the evolutionary level, this may be a hint for gene captures between distinct classes of viral elements, and/or of convergent evolution for the triggering of a systemic effect via a shedding process.

[0571] A further question concerns the possible role of HEMO in human physiology and/or pathology. Due i) to the high level of purifying selection acting on the gene in simians, ii) to the conservation in Marsupials of a gene transcribed from a similar promoter type and encoding a protein closely related in both sequence and mature protein structure, iii) to the rather uncommon profile of expression in development, and iv) to the massive shedding by the placenta of the protein into the blood, it can be anticipated that HEMO fulfils a role, most probably in pregnancy. A protective effect against infection by viruses and/or retroviruses would also be relevant. Such protective effects could be mediated by classical “interference”, via the sequestration of the receptor for the incoming virus, an effect which could be further enhanced by the release of the HEMO protein in the blood circulation and direct targeting of such receptors. Alternately, HEMO might possess a cytokine-like or hormone-like activity, with a possible role in pregnancy. An effect of HEMO in development should also be considered, taking into consideration that its expression is observed as early as at the 8-cell stage and persists at all the subsequent embryonic stages. Of note, other ERVs—including HERV-H and HERV-K—have related profiles of expression and abundant HERV-H RNA was recently demonstrated to be a marker of cell “stemness” in humans and to possibly play a role—via transcriptional effects and/or specific ERV-driven transcripts—in the maintenance of pluripotency in human stem cells. In the case of HEMO, which unambiguously encodes a retroviral envelope protein that can further be detected, its expression might not only be a “sternness” marker, as for the above highly reiterated ERVs, but its encoded protein might also constitute a molecular effector of pluripotency per se. Finally, we could unravel HEMO gene expression in a series of human tumors, and demonstrate HEMO protein expression in ovarian tumors. Further immunological analyses based on a large number of tumors and control tissues will have to be performed to definitely correlate HEMO protein expression with specific tumor histotypes for other retroviral Env expressed in ovarian tumors), and to assess whether this protein can be considered as a reliable marker of a given tumoral state and, tentatively, as a possible target for immuno-therapeutic approaches.

[0572] Experiments are now in progress to identify the cellular interacting partners of the HEMO protein, to further characterize HEMO functions in vivo, in both normal development and the onset of pathological processes.

### Example 2: mAb Production

[0573] Antibodies were produced by immunizing mice with a DNA fragment coding for 163 amino acids of the HEMO SU envelope subunit (aa 123 to 286; SEQ ID NO: 8), as described in example 1 above. Hybridoma 2F7 (IgG2a isotype), which is referred to in example 1 above, as well as other hybridoma were produced using standard cell fusion.

[0574] The hybridomas were deposited at the CNCM under the terms of the Budapest Treaty. CNCM is Collection Nationale de Culture de Microorganismes (Institut Pasteur; 28, rue du Docteur Roux; 75724 Paris CEDEX 15; France).

TABLE 6
mAb deposited at the CNCM

| | | | Antigen that has |
|---|---|---|---|
| | Number of CNCM | Date of CNCM | been used for Ab |
| Hybridoma | deposit | deposit | production |
| 2F7-E8 | I-5211 | Jun. 20, 2017 | SEQ ID NO: 8 |

[0575] A 121 amino acid HEMO ectodomain fragment—named HST5—from position 280 to 400 of SEQ ID NO: 1 is used as the antigen:

(SEQ ID NO: 988)
280-TWWLTGSNLTLSVNNSGLFFLCGNGVYKGFPPKWSGRCGLGYLVPS
LTRYLTLNASQITNLRSFIHKVTPHRCTQGDTDNPPLYCNPKDNSTIRAL
FPSLGTYDLEKAILNISKAMEQEFS-400

[0576] It is cloned in an eukaryotic expression vector as an N-terminal-Strep-tag (StrepTaglinker(GGGS)x3)-StrepTag)-HEMO fragment, and expressed in Drosophila cells S2. The antigen-StrepTag protein fragment is purified from the supernatant by a two-step method: first, on a Strep Tactin column and second, on a HiLoad 16/60 Superdex 75 column. Fractions are pooled and adjusted to 1 mg/ml, and used for immunization of mice and rats for 4 injections at Day0, D15, D45 and D60. Polyclonal antibodies production is tested by ELISA at Day25 and D55. Serum polyclonal antibodies are recovered after injections of the Streptag-HST5. Polyclonal antibodies are tested by Western Blot, ELISA and flow cytometry. Monoclonal Antibodies cloning are also done.

Sequence of the Streptag-HST5 peptide (SEQ ID NO:
989):
MTMITPSLHAGLCILLAVVAFVGLSLGASWSHPQFEKGGGSGGGSGGGSW
SHPQFEKGADDDDKTGTWWLTGSNLTLSVNNSGLFFLCGNGVYKGFPPKW
SGRCGLGYLVPSLTRYLTLNASQITNLRSFIHKVTPHRCTQGDTDNPPLY
CNPKDNSTIRALFPSLGTYDLEKAILNISKAMEQEFS
Strep Tag: in italic
Linker: in bold
Hemo-HST5 sequence aa 280 to 400: underlined

### Example 3: Production of Antibodies that (Specifically) Bind to the Membrane-Attached Portion of the HEMO Ectodomain [That is Retained at the Cell Surface after Shedding of the Soluble Fragment]

[0577] A DNA fragment coding for 57 amino acids of the ectodomain part of the HEMO protein (aa 433 to 489; SEQ ID NO: 990), corresponding to a post-SHED fragment, can be inserted into the pET28b and expressed in BL21 bacteria as described in Example 1, and the recombinant protein fragment used to immunize mice.

[0578] Synthetic peptides (10 to 20 amino acids) corresponding to portions of the membrane-attached ectodomain protein (aa 433 to 489; SEQ ID NO: 990) can be synthetized and conjugated to carrier protein, such as KLH (keyhole limpet hemocyanin). Peptides are administered to mice for immunization.

[0579] The antibodies produced are collected. Hybridomas are produced using standard cell fusion.

### Example 4: Screening/Histotyping of a Large Panel of Tumors

[0580] The HEMO protein can be considered as a potential cancer biomarker and promising therapeutic target. Samples of tumor tissues are screened for the presence of the HEMO protein, by immunohistochemistry, according to the protocol described in Example 1, more particularly for the presence of a (N-terminal) soluble fragment of HEMO ectodomain and/or for the presence of a membrane-anchored (C-terminal) fragment of HEMO domain HEMO (fragment, which is retained at the cell surface after shedding of the soluble fragment). The antibodies, more particularly monoclonal antibodies, of examples 2 and/or 3 can be used for this detection. Control (non-tumoral) tissues are screened in parallel.

[0581] The tumor tissues comprise in a non-limitative way:
[0582] Ovarian
[0583] Uterine: Endometrial, Cervical, Gestational (Choriocarcinoma)
[0584] Breast
[0585] Lung
[0586] Colon
[0587] Germ cell
[0588] Head and Neck
[0589] Bone marrow

[0590] The cells expressing HEMO can be isolated from fresh tumoral samples (more particularly biopsies), using FACS analysis with Antibodies described in example 2 and 3, and further analyzed for cell marker identification, more particularly for identification of stem cell marker(s). Control (non-tumoral) cells are analyzed in parallel.

### Example 5: Optimization of a Blood Detection Test (for Diagnostic, Pronostic and Evolution)

[0591] An Elisa assay can be used to detect variability in the HEMO sera level, in normal and pathological conditions and/or follow the evolution in pathological conditions. Such an assay may comprise antibodies described in Example 2.

### Example 6: HEMO Protein Expression in Tumors

### 1—Microarray

[0592] Method

[0593] In silico analysis of microarray was performed, as indicated in Exemple 1 (Microarray data mining), on additional data from the Expression project for Oncology (expO) dataset (GEO accessions GSE2109), and boxplot representations were plotted according to the tumor primary site.

[0594] Results

[0595] Microarray dataset analyses (FIGS. 9A and 9B, and FIG. 14) show heterogenous expression in many tumor types. This is also observed with the TCGA RNAseq dataset of NIH-GDC Data Portal (FIG. 15A, https://portal.gdc.cancer.gov/projects).

[0596] In summary, tumors with higher HEMO expression are
[0597] gynecological cancer:
   [0598] ovary: histological sub-type “Clear Cell Carcinoma” and “Endometrioid”
   [0599] uterus: endometrial and cervical cancer
[0600] breast cancer
[0601] lung cancer
[0602] digestive cancer: colorectal, stomach, liver
[0603] head and neck cancer
[0604] germ cell cancer
[0605] urothelial cancer (including bladder)
[0606] bone marrow cancer,
   and to a less extend, tumors from kidney, prostate and brain.

[0607] Heterogeneity may depend on the amount of cancer cells in the samples and on the tumor stage.

### 2—TGCA RNAseq

[0608] Method

[0609] FastQ files from TCGA RNAseq-tumors were downloaded from the TCGA site FastQ files from TCGA RNAseq-tumors were downloaded from the TCGA site portal.gdc.cancer.gov/projects and reads for HEMO and a set of House-Keeping genes were quantified, and normalized using the R-DESeq2 package. Hemo expression is shown as boxplots using the R ggplot2 package.

[0610] Results

[0611] FIG. 15B, I: Number of cases of Control and Tumoral tissues are indicated. Each dot represents a case.

[0612] FIG. 15B, II: Boxplot enlargments are shown, and exclude the highest values.

[0613] Box plots show high and heterogeneous HEMO expression in tumors, compared to the controlateral normal tissues in HNSC and UCEC. Heterogeneity is observed for HEMO expression in the 3 dataset with highest values in UCEC dataset (FIG. 15B).

3—HEMO Expression in Tumors Samples from Gustave Roussy

[0614] Methods

[0615] Analysis was performed on a representative panel (20 to 30 samples for each tumor type: Ovary, Uterus, Breast and Head & Neck) as follows:
[0616] Frozen samples of tumor tissues and normal control tissue were processed as indicated:
   [0617] Western Blot (see Example 1): protein extraction was done on 20 cryosections of 50 μM and monoclonal antibody 2F7 (CNCM I-5211) was used;
   [0618] Tissue staining (Hematoxylin Eosin Saffron) was performed on control cryosections of 5 μm; and
[0619] Immunochemistry (IHC) was done with monoclonal antibody 2F7 (CNCM I-5211) on corresponding Formalin-Fixed Paraffin-Embedded (FFPE) samples as follows: paraffin sections were processed for heat-induced antigen retrieval (Tris-EDTA, pH 9; Abcam) and incubated overnight with the monoclonal mouse anti-HEMO (2F7, CNCM I-5211) antibody (1/10 dilution) or a control IgG2a isotype. Staining was visualized by using the peroxidase/diaminobenzidine Mouse PowerVision® kit (ImmunoVision Technologies®).

[0620] Results

### Ovarian Carcinomas (FIG. 16A, 16B)

[0621] Western blot analysis of protein extracts (using 2F7 mAB) shows expression of HEMO in Placenta sample and in Ovarian Endometrioid (E) and Clear Cell Carcinomas (C1 to C5) samples. No expression is detected in normal ovarian tissues (N1 and N2). Membrane was rehybridized with an anti-tubulin Ab to quantify protein load in the samples.

[0622] Immunohistochemical analysis (using the 2F7 mAb) of formalin-fixed Ovarian Endometrioid tumors from two patients, shows high HEMO expression in specific tumor cells. Details in HES sections of patient II show heterogeneity in tumor cells.

### Uterine Carcinomas (FIG. 17)

[0623] HES and IHC (using the 2F7 mAb) at different magnifications show specific expression of the HEMO protein in specific tumor cells of Endometrial Carcinomas from two patients. No HEMO expression is detected in the normal tissues on the same sections.

### Breast Carcinomas (FIG. 18)

[0624] HES and IHC (using the 2F7 mAb) at different magnifications show no HEMO expression in normal controlateral breast tissue and show HEMO expression at various levels in two patients with Breast tumors of different molecular signatures: high staining is observed in tumor cells of a HER2+ Breast Carcinoma and more diffuse staining is observed in a Triple Neg Breast Carcinoma.

### 4—Characterization of HEMO Positive Tumoral Cells

[0625] HEMO being express in stem cells (ES and iPSC) and in placental cytotrophoblastic cells, both being highly proliferative, HEMO positive cells is isolated from tumors to characterize their potential proliferative properties. Tumor-HES and IHC (see example 6, part 3) showed specific morphology of the HEMO positive cells in the tumoral samples, these cells can be targeted by specific antibodies (drug conjugated mono or bispecific).

[0626] To investigate the potential and utility of targeting HEMO positive cells in a tumor, these cells are isolated and sorted by flow cytometer, with the anti-HEMO antibodies described in Examples 2 and 3, then their proliferative status is analyzed, compared to the HEMO negative cells. RNAseq analyses were performed on HEMO positive and negative cells, in different tumor types, and compared to search for specific molecular pathways, and expression of stem cell markers. Proliferative properties are also investigated in ex vivo models and in PDX-mice.

### Example 7: Development of a Blood-ELISA Assay for Detection of Circulating HEMO Shed Protein

[0627] Under physiological conditions, the protein is detected by Western blot on deglycosylated samples of human sera, and the level rise during pregnancy (FIG. 6). The aim was to develop a sensitive assay to detect variation in the serum level of patient with HEMO-positive tumors, or in women with pathological pregnancy.

[0628] A sandwich ELISA test was developed (FIG. 19A) which consists of at least one purified monoclonal antibody coated at a high concentration (200 ng of capture antibodies in each well of Maxisorp® plate), in order to capture the serum HEMO shed protein, and a second polyclonal or monoclonal antibody, against a different epitope of the protein to detect the captured HEMO.

[0629] Method

### Reagents:

[0630] PBST: PBS 1×+0.1% Tween 20
[0631] BSA (Bovine Serum Albumin)
[0632] Capture antibodies (a rabbit Hemo-TM-capture-polyclonal antibody, SIGMA-ALDRICH®, Product Name=Anti-ERVMER34-1)
[0633] Primary antibodies (see Example 1: mouse anti-HEMO polyclonal antibody), or purified 2F7 mAb, or supernatant of hybridoma, or ScFv HIS-tag or rabbit-Fc mAbs
[0634] Secondary antibodies (anti-mouse HRP), or anti-HIS HRP or anti-rabbit HRP
[0635] Revelation solution TMB
[0636] Phosphoric acid 1M

### Materials:

[0637] Maxisorp® plate (Nunc, ThermoFischer®)
[0638] Pipettes
[0639] Biotek® plate reader
[0640] Sealing films

### Steps:

### D−1:

[0641] Coat 200 ng of capture antibodies in each well of Maxisorp plate
[0642] Seal the plate and incubate overnight at 4° C.

### D0:

[0643] Keep the coating solution
[0644] Saturate the plate with 100 μL of PBST (PBS 1×+0.1% Tween)+5% BSA and incubate during 1 h at room temperature
[0645] Add 50 μL of antigen solution (generally supernatant of HH1 transfected cells diluted in SVF, ratio 1:50) or samples or sera samples in each well
[0646] Wash the plate 3 times with 300 μL of PBST in each well
[0647] Prepare a primary antibody solution in PBST+1% BSA (1/1000)
[0648] Add 50 μL of primary antibody solution in each well and incubate at room temperature during at least 1 h
[0649] Wash the plate 3 times with 300 μL of PBST in each well
[0650] Prepare a secondary antibody solution in PBST+1% BSA (1/5000)
[0651] Add 50 μL of secondary antibody solution in each well and incubate at room temperature during 45 min
[0652] Wash the plate 3 times with 300 μL of PBST in each well
[0653] Add 50 μL of revelation solution after mixing solution A to solution B (ratio 1:1)
[0654] Add 50 μL of phosphoric acid (1 M) to stop the reaction
[0655] Read the plate at 450 nm with a plate reader

[0656] Results

[0657] The curve obtained with ELISA assay (FIG. 19B) showed the same result as the detection of HEMO by Western Blot on peripheral blood of pregnant women (FIG. 6): more time of pregnancy is high, more HEMO is detected.

### Example 8: Antibodies Raised Against the C-Terminal Part of the HEMO-Ectodomain

[0658] After shedding, the C-terminal part of the Ectodomain, namely between the major shedding sites (432-433 of SEQ ID NO: 1) and the beginning of the transmembrane domain (around position 492 of SEQ ID NO: 1) is still present at the extracellular side of the cell membrane, anchored by the downstream transmembrane region of HEMO. This N-terminal part of the post-SHED-HEMO is accessible to specific antibodies.

[0659] To target HEMO tumoral producing cells with high efficiency, an antibody was developed for further drug conjugate Ab-targeting.

[0660] Method

[0661] A 85 amino acid HEMO ectodomain fragment—named HTM5—from position 387 to 471 of SEQ ID NO: 1, namely on both sides of the shedding site QR, is used as the antigen:

(SEQ ID NO: 919)
387-AILNISKAMEQEFSATKQTLEAHQSKVSSLASASRKDHVLDIPTTQ
RQTACGTVGKQCCLYINYSEEIKSNIQRLHEASENLKNV-471

[0662] It was cloned in an eukaryotic expression vector as an N-terminal-Strep-tag (StrepTaglinker(GGGS)x3)-StrepTag)-HEMO fragment, and expressed in Drosophila cells S2. The HTM5-StrepTag protein fragment was purified from the supernatant by a two-step method: first, on a Strep Tactin column and second, on a HiLoad 16/60 Superdex 75 column. Fractions were pooled and adjusted to 1 mg/ml, and used for immunization of mice and rats for 4 injections at Day0, D15, D45 and D60. Polyclonal antibodies production was tested by ELISA at Day25 and D55. Serum polyclonal antibodies were recovered after injections of the Streptag-HTM5. Polyclonal antibodies were tested by Western Blot, ELISA and flow cytometry. The serum of one mice containing polyclonal antibodies against the StrepTag-HTM5 peptide alone was used in the experiments (FIGS. 20A and 20B). Monoclonal Antibodies cloning are also done.

Sequence of the Streptag-HTM5 peptide (SEQ ID NO:
920):
MTMITPSLHAGLCILLAVVAFVGLSLGASWSHPQFEKGGGSGGGSGGGSW
SHPQFEKGADDDDKTGAILNISKAMEQEFSATKQTLEAHQSKVSSLASAS
RKDHVLDIPTTQRQTACGTVGKQCCLYINYSEEIKSNIQRLHEASENLKN
V
Strep Tag: in italic
Linker: in bold
Hemo-HTM5 sequence aa 387 to 471: underlined

[0663] To test if the mouse pAb-antiHTM5 can detect the native form of the protein, and both side of the shedding site, namely the C-term of the Shed-HEMO and the N-term of the membrane attached-HEMO, various HEMO producing vectors were constructed and transfected in 293T cells:

| | |
|---|---|
| 1. | the full-length HEMO-pHCMV vector |
| 2. | a SU-HEMO-pHCMV vector (aa 1 to 351 of SEQ ID |
| | NO: 1 = SEQ ID NO: 921) |
| 3. | a TM-HEMO-pHCMV vector (internal deletion from |
| | aa 34 to 352 = 1-33 + 353-563 from SEQ ID NO: |
| | 1): |
| | MGSLSNYALLQLTLTAFLTILVQPQHLLAPVFRTQGDTDNPPLYCN |
| | PKDNSTIRALFPSLGTYDLEKAILNISKAMEQEFSATKQTLEAHQS |
| | KVSSLASASRKDHVLDIPTTQRQTACGTVGKQCCLYINYSEEIKSN |
| | IQRLHEASENLKNVPLLDWQGIFAKVGDWFRSWGYVLLIVLFCLFI |
| | FVLIYVRVFRKSRRSLNSQPLNLALSPQQSAQLLVSETSCQVSNRA |
| | MKGLTTHQYDTSLL (SEQ ID NO: 922) |
| 4. | a post-SHED-HEMO-pHCMV vector (internal |
| | deletion from aa 34 to 432 = 1-33 + 433-563 |
| | from SEQ ID NO: 1): |
| | MGSLSNYALLQLTLTAFLTILVQPQHLLAPVFRRQTACGTVGKQCC |
| | LYINYSEEIKSNIQRLHEASENKNVPLLDWQGIFAKVGDWFRSWGY |
| | VLLIVLFCLFIFVLIYVRVFRKSRRSLNSQPLNLALSPQQSAQLLV |
| | SETSCQVSNRAMKGLTTHQYDTSLL (SEQ ID NO: 923) |

[0664] After transfections, either cell lysates were analyzed by Western blot with the HTM5-pAB (FIG. 20A) or cells were analyzed by flow cytometry with the mouse pAB-HTM5 (FIG. 20B).

[0665] Immunizations of mice and rats are also done with other human HEMO ectodomain fragments (see below) linked to KLH (keyhole limpet hemocyanin) protein carrier thanks to a cystein amino acid at the C-terminal extremity of said human HEMO ectodomain fragments:

TABLE 7
Human HEMO ectodomain fragments used to
produce antibodies raised against the
C-terminal part of the HEMO-ectodomain.

| From | To | | SEQ |
|---|---|---|---|
| amino | amino | human HEMO ectodomain | ID |
| acid | acid | fragments | NO: |
| 466 | 492 | ENLKNVPLLDWQGIFAKVGDWFRSWGY | 924 |
| 466 | 491 | ENLKNVPLLDWQGIFAKVGDWFRSWG | 925 |
| 466 | 490 | ENLKNVPLLDWQGIFAKVGDWFRSW | 926 |
| 466 | 489 | ENLKNVPLLDWQGIFAKVGDWFRS | 927 |
| 466 | 488 | ENLKNVPLLDWQGIFAKVGDWFR | 928 |
| 467 | 492 | NLKNVPLLDWQGIFAKVGDWFRSWGY | 929 |
| 467 | 491 | NLKNVPLLDWQGIFAKVGDWFRSWG | 930 |
| 467 | 490 | NLKNVPLLDWQGIFAKVGDWFRSW | 931 |
| 467 | 489 | NLKNVPLLDWQGIFAKVGDWFRS | 932 |
| 467 | 488 | NLKNVPLLDWQGIFAKVGDWFR | 933 |
| 468 | 492 | LKNVPLLDWQGIFAKVGDWFRSWGY | 934 |
| 468 | 491 | LKNVPLLDWQGIFAKVGDWFRSWG | 935 |
| 468 | 490 | LKNVPLLDWQGIFAKVGDWFRSW | 936 |
| 468 | 489 | LKNVPLLDWQGIFAKVGDWFRS | 937 |
| 468 | 488 | LKNVPLLDWQGIFAKVGDWFR | 938 |
| 468 | 486 | LKNVPLLDWQGIFAKVGDW | 939 |
| 465 | 492 | SENLKNVPLLDWQGIFAKVGDWFRSWGY | 981 |
| 465 | 491 | SENLKNVPLLDWQGIFAKVGDWFRSWG | 982 |
| 465 | 490 | SENLKNVPLLDWQGIFAKVGDWFRSW | 983 |
| 465 | 489 | SENLKNVPLLDWQGIFAKVGDWFRS | 984 |
| 465 | 488 | SENLKNVPLLDWQGIFAKVGDWFR | 985 |
| 465 | 484 | SENLKNVPLLDWQGIFAKVG | 986 |
| 473 | 492 | LLDWQGIFAKVGDWFRSWGY | 987 |

[0666] Results

[0667] The HTM5 antibody (mouse polyclonal anti aa 387-471 of SEQ ID NO: 1=SEQ ID NO: 919) can detect the native form of (FIG. 20A-20B):
[0668] the full length-HEMO
[0669] the TM part of HEMO and not the SU
[0670] the C-terminal part of the ectodomain (aa 433-471).

### Example 9: KO (Knock-Out) Cell Clones for HEMO by CrispR-Cas9

[0671] CaCo-2 CELL LINE

[0672] Development of the CrispR technique on the CaCo-2 cell line, human colon adenocarcinoma, strongly expressing HEMO (see FIG. 2B):
[0673] 1. transfection of plasmids containing the Cas9 gene, and various RNA-guides for targeting the gene HEMO (4 different regions chosen);
[0674] 2. Obtaining KO clones on the two alleles, which no longer expressing the HEMO protein, by limiting dilution; and
[0675] 3. Verification by sequencing clones DNA: mutation of the ORF (nucleotide indel with frame-shift and premature stop codon); and
[0676] 4. Verification by IHC with monoclonal antibody 2F7 (CNCM I-5211) on FFPE block cells and by Western Blot on concentrated supernatant of WT (Wild Type) and KO cells in culture.

[0677] Induced Pluripotent Stem Cell (iPSC)

[0678] Obtaining several iPSC KO clones on the two alleles in several steps:
[0679] 1. electroporation of the Cas9-Guide plasmid, with the 2 best guides (among the 4 tested with CaCo-2);
[0680] 2. Verification of mutations by sequencing the HEMO gene;
[0681] 3. Verification of the absence of protein in the concentrated culture supernatant of iPSC-KO clones; and
[0682] 4. Verification of the pluripotency of KO clones obtained by the capacity
   [0683] to develop embryoid bodies in culture,
   [0684] and teratomas in NSG (Nod Scid Gamma) mice.

[0685] Result

[0686] Both CaCo-2 (FIG. 21A, 21B) and iPSC (FIG. 21C) allow the development of KO HEMO cells as it confirmed by IHC and Western Blot analyses. It has to be pointed out that these KO clones (CaCo-2 or iPSC) represent tools to study:
[0687] the role of HEMO (transcriptomic analysis of RNAseq of WT cells and KO cells: search for genes whose expression is modulated by HEMO); and
[0688] the effect of specific drugs directed against the protein, in cultured cell systems or mouse xenografts (PDX).

### Example 10: Method for Detecting a Defect in Placentation

[0689] Variations of expression of the HEMO protein in the blood of pregnant women are evaluated, to see if there is a correlation with pathologies pregnancy (Intra-Uterine Growth Delay, Pre-Eclampsia, etc.).

[0690] The cohort includes 200 samples of pregnant women.

[0691] It obtains the blood samples from pregnant women, around the 28^{th} WA (Week of Amenorrhea), during the second trimester sampling (6^{th} month):
[0692] one dry tube on gel, to recover the serum (analysis of the serum level of the HEMO protein produced by the placenta by Western Blot and/or ELISA test);
[0693] optional: one EDTA tube, to recover maternal DNA from cells lymphocytes (verification of the HEMO gene sequence).

[0694] It is also possible
[0695] to return to the medical file, looking for associated pathologies,
[0696] to obtain a second blood sample (current 3^{rd} trimester, or pre-delivery), to check the serum level of HEMO,
[0697] in the event of an abnormality, to obtain at delivery a fragment of placental tissue or of fetal cord to analyze the fetal DNA, to check the HEMO gene sequence (the protein being produced by the placenta, of fetal origin).

[0698] The pregnant woman have signed a consent for the research on the blood samples and have given the following desired information:
[0699] whether it is a twin pregnancy or not, and whether it is a pregnancy mono- or bi-chorial,
[0700] if there is already a known pathology in the progress of the pregnancy and current infections (HIV in particular),
[0701] the number of children, and
[0702] other pathologies (tumor, other)

### Example 11: Cloning of the mAB as ScFv Fragments

[0703] Method

[0704] One mAbs against the SU domain have been obtained (2F7, CNCM I-5211, see Example 2), which is a mouse IgG2a antibodies. For future use (ELISA blood tests, cristallography experiments, and putative cancer targeting) this mAbs were engineered and cloned as scFv fragments as follows:
[0705] 1. Cloning of the ScFv as VH-(linker{GGGGS}x4)-Vkappa fragments from RNAs of hybridoma Ab;
[0706] 2. producing cell lines, by conventional RACE method;
[0707] 3. Sequence determination; and
[0708] 4. Production and verification of ScFv binding to the HEMO protein, by Western Blot, ELISA, flow cytometry, or IHC tests.

[0709] Result

[0710] ELISA binding (FIG. 22A) and flow cytometry binding (FIG. 22B) of ScFv-2F7-Fc and ScFv-2F7-His to the SHED-HEMO protein produced in supernatant of 293T transfected cells, compared to empty vector transfected supernatants, showed that the scFV fragment works as the full 2F7 antibody (CNCM I-5211).

### Sequences

[0711] The sequences are described by reference to the Figures and to the Examples. A ST25-sequence listing is also attached.

TABLE 8
sequences

| SEQ ID NO: | | |
|---|---|---|
| 1 | Human HEMO protein | Human sequence (FIG. 1C) |
| 129-142 | Non-human HEMO proteins | Boreoeutheria mammals (Euarchontoglies) |
| | Non-human Boreoeutheria mammals | CPZ, GOR, ORA, GIB, MAC, BAB, AGM, COL, LAN, RHI, MAR, SQM, SPI, SAK |
| | | cf. FIGS. 11A, 11B, 12A, 12B |
| 143 | | Boreoeutheria mammals (Laurasiathera) |
| | | CAT |
| | | cf. FIGS. 12A, 12B |
| 144-146 | Marsupial env-panMars proteins | Marsupial mammals |
| | | OPO, WAL, TAS |
| | | cf. FIGS. 12A, 12B |
| 2 | Human HEMO signal peptide | 1-26 from SEQ ID NO: 1 |
| 168 | End position 26, 24 or 25 | 1-24 from SEQ ID NO: 1 |
| 169 | | 1-25 from SEQ ID NO: 1 |
| 147 | Generic signal peptide for HEMO protein of | MX⁷SLX⁸X⁹YX¹⁰LLX¹¹LX¹²X¹³TAX¹⁴LTX¹⁵X¹⁶VQX¹⁷QH |
| | Boreoeutheria mammals | wherein |
| | HUM, CPZ, GOR, ORA, GIB, MAC, BAB, AGM, | X⁷ = G, X⁸ = S, X⁹ = N, X¹⁰ = A, X¹¹ = Q, X¹² = T, X¹³ = L, X¹⁴ = F, X¹⁵ = I, X¹⁶ = L, and X¹⁷ = P [=SEQ |
| | COL, LAN, RHI, MAR, SQM, SPI, SAK | ID NO: 2]; or |
| | Cf. FIG. 11A | X⁷ = G, X⁸ = S, X⁹ = N, X¹⁰ = A, X¹¹ = Q, X¹² = T, X¹³ = F, X¹⁴ = F, X¹⁵ = I, X¹⁶ = L, and X¹⁷ = P; or |
| | end position = aa position 26, 24 or 25 | X⁷ = V, X⁸ = S, X⁹ = N, X¹⁰ = A, X¹¹ = Q, X¹² = T, X¹³ = L, X¹⁴ = F, X¹⁵ = I, X¹⁶ = L, and X¹⁷ = A; or |
| | | X⁷ = V, X⁸ = S, X⁹ = D, X¹⁰ = A, X¹¹ = Q, X¹² = T, X¹³ = L, X¹⁴ = F, X¹⁵ = I, X¹⁶ = L, and X¹⁷ = A; or |
| | | X⁷ = V, X⁸ = S, X⁹ = N, X¹⁰ = A, X¹¹ = Q, X¹² = T, X¹³ = L, X¹⁴ = F, X¹⁵ = T, X¹⁶ = L, and X¹⁷ = A; or |
| | | X⁷ = G, X⁸ = L, X⁹ = N, X¹⁰ = G, X¹¹ = P, X¹² = M, X¹³ = L, X¹⁴ = L, X¹⁵ = I, X¹⁶ = Q, and X¹⁷ = P; or |
| | | X⁷ = G, X⁸ = S, X⁹ = N, X¹⁰ = G, X¹¹ = Q, X¹² = T, X¹³ = L, X¹⁴ = L, X¹⁵ = I, X¹⁶ = R, and X¹⁷ = P; or |
| | | X⁷ = D, X⁸ = S, X⁹ = N, X¹⁰ = V, X¹¹ = Q, X¹² = T, X¹³ = L, X¹⁴ = L, X¹⁵ = I, X¹⁶ = R, and X¹⁷ = P; or |
| | | X⁷ = G, X⁸ = S, X⁹ = N, X¹⁰ = V, X¹¹ = Q, X¹² = T, X¹³ = L, X¹⁴ = L, X¹⁵ = I, X¹⁶ = R, and X¹⁷ = P |
| 405 | | MX⁷SLX⁸X⁹YX¹⁰LLX¹¹LX¹²X¹³TAX¹⁴LTX¹⁵X¹⁶VQX¹⁷ |
| 406 | | MX⁷SLX⁸X⁹YX¹⁰LLX¹¹LX¹²X¹³TAX¹⁴LTX¹⁵X¹⁶VQX¹⁷Q |
| 3 | Human HEMO protein without the signal peptide | 27-563 from SEQ ID NO: 1 |
| 170 | Start position 27, 25 or 26 | 25-563 from SEQ ID NO: 1 |
| 171 | End position 563 | 26-563 from SEQ ID NO: 1 |
| 4 | Human HEMO ectodomain | 27-489 from SEQ ID NO: 1 |
| 172 | (without the signal peptide) | 25-489 from SEQ ID NO: 1 |
| 173 | start position 27, 25 or 26 | 26-489 from SEQ ID NO: 1 |
| 174 | end position 489, 488, 491 or 486 | 27-488 from SEQ ID NO: 1 |
| 175 | | 25-488 from SEQ ID NO: 1 |
| 176 | | 26-488 from SEQ ID NO: 1 |
| 177 | | 27-491 from SEQ ID NO: 1 |
| 178 | | 25-491 from SEQ ID NO: 1 |
| 179 | | 26-491 from SEQ ID NO: 1 |
| 180 | | 27-486 from SEQ ID NO: 1 |
| 181 | | 25-486 from SEQ ID NO: 1 |
| 182 | | 26-486 from SEQ ID NO: 1 |
| 438 | Human HEMO signal peptide and ectodomain | 1-489 from SEQ ID NO: 1 |
| 439 | end position 489, 488, 491 or 486 | 1-488 from SEQ ID NO: 1 |
| 440 | | 1-491 from SEQ ID NO: 1 |
| 441 | | 1-486 from SEQ ID NO: 1 |
| 442-456 | Non-human HEMO ectodomain | Ectodomain corresponding to positions 27-489 of human ectodomain (SEQ ID NO: 4) |
| 457-471 | (without the signal peptide) | Ectodomain corresponding to positions 25-489 of human ectodomain |
| 472-486 | non-human Boreoeutheria mammals | Ectodomain corresponding to positions 26-489 of human ectodomain |
| 487-501 | CPZ, GOR, ORA, GIB, MAC, BAB, AGM, COL, | Ectodomain corresponding to positions 27-488 of human ectodomain |
| 502-516 | LAN, RHI, MAR, SQM, SPI, SAK, CAT | Ectodomain corresponding to positions 25-488 of human ectodomain |
| 517-531 | cf. FIGS. 11A, 11B, 12A, 12B and 12C | Ectodomain corresponding to positions 26-488 of human ectodomain |
| 532-546 | | Ectodomain corresponding to positions 27-491 of human ectodomain |
| 547-561 | | Ectodomain corresponding to positions 25-491 of human ectodomain |
| 562-576 | | Ectodomain corresponding to positions 26-491 of human ectodomain |
| 577-591 | | Ectodomain corresponding to positions 27-486 of human ectodomain |
| 592-606 | | Ectodomain corresponding to positions 25-486 of human ectodomain |
| 607-621 | | Ectodomain corresponding to positions 26-486 of human ectodomain |
| 7 | Human HEMO ImmunoSuppressive Domain | 420-436 from SEQ ID NO: 1 |
| | (ISD) | |
| 148 | Generic ISD for HEMO protein of | SX¹⁸X¹⁹DX²⁰VLDX²¹PTTQRQTA |
| | Boreoeutheria mammals | wherein |
| | HUM, CPZ, GOR, ORA, GIB, MAC, BAB, AGM, | X¹⁸ = R, X¹⁹ = K, X²⁰ = H, and X²¹ = I [=SEQ ID NO: 7]; or |
| | COL, LAN, RHI, MAR, SQM, SPI, SAK | X¹⁸ = Q, X¹⁹ = K, X²⁰ = H, and X²¹ = I; or |
| | Cf. FIG. 11B | X¹⁸ = P, X¹⁹ = N, X²⁰ = R, and X²¹ = I; or |
| | | X¹⁸ = P, X¹⁹ = N, X²⁰ = R, and X²¹ = L |
| 410 | Human HEMO C-X6-CC motif | CGTVGKQCC |
| 149 | Generic C-X6-CC motif for HEMO protein of | CX²²X²³X²⁴X²⁵X²⁶X²⁷CC |
| | Boreoeutheria mammals | wherein |
| | HUM, CPZ, GOR, ORA, GIB, MAC, BAB, AGM, | X²² = G, X²³ = T, X²⁴ = V, X²⁵ = G, X²⁶ = K and X²⁷ = Q; or |
| | COL, LAN, RHI, MAR, SQM, SPI, SAK, CAT | X²² = R, X²³ = T, X²⁴ = V, X²⁵ = G, X²⁶ = K and X²⁷ = Q; or |
| | Cf. FIG. 11B | X²² = G, X²³ = T, X²⁴ = V, X²⁵ = D, X²⁶ = K and X²⁷ = Q; or |
| | | X²² = T, X²³ = I, X²⁴ = V, X²⁵ = G, X²⁶ = N and X²⁷ = Q |
| 187 | Generic C-X7-CC motif for retroviral Env | |
| 188 | Generic C-X5-CC motif for retroviral Env | |
| 5 | Human HEMO transmembrane domain | 490-512 from SEQ ID NO: 1 |
| 427 | start position 490, 489, 492 or 487 | 489-512 from SEQ ID NO: 1 |
| 428 | end position 512, 509 or 513 | 492-512 from SEQ ID NO: 1 |
| 429 | | 487-512 from SEQ ID NO: 1 |
| 430 | | 490-509 from SEQ ID NO: 1 |
| 431 | | 489-509 from SEQ ID NO: 1 |
| 432 | | 492-509 from SEQ ID NO: 1 |
| 433 | | 487-509 from SEQ ID NO: 1 |
| 434 | | 490-513 from SEQ ID NO: 1 |
| 435 | | 489-513 from SEQ ID NO: 1 |
| 436 | | 492-513 from SEQ ID NO: 1 |
| 437 | | 487-513 from SEQ ID NO: 1 |
| 151 | Generic transmembrane domain for HEMO | WGYVX²⁹LIVX³⁰FCLX³¹IFVLX³²YX³³X³⁴X³⁵F, |
| | protein of Boreoeutheria mammals | wherein |
| | HUM, CPZ, GOR, ORA, GIB, MAC, BAB, AGM, | X²⁹ is L; X³⁰ is L; X³¹ is F; X³² is I; X³³ is V; X³⁴ is R; and X³⁵ is V [=SEQ ID NO: 5]; or |
| | COL, LAN, RHI, MAR, SQM, SPI, SAK | X²⁹ is L; X³⁰ is L; X³¹ is F; X³² is I; X³³ is V; X³⁴ is H; and X³⁵ is V; or |
| | Cf. FIG. 11B | X²⁹ is L; X³⁰ is L; X³¹ is F; X³² is I; X³³ is V; X³⁴ is H; and X³⁵ is I; or |
| | start position = 490, 489, 492 or 487 | X²⁹ is L; X³⁰ is F; X³¹ is I; X³² is I; X³³ is V; X³⁴ is R; and X³⁵ is F; or |
| | end position = 512 | X²⁹ is L; X³⁰ is F; X³¹ is I; X³² is I; X³³ is I; X³⁴ is R; and X³⁵ is F; or |
| | | X²⁹ is L; X³⁰ is F; X³¹ is I; X³² is T; X³³ is V; X³⁴ is R; and X³⁵ is F; or |
| | | X²⁹ is F; X³⁰ is F; X³¹ is I; X³² is I; X³³ is V; X³⁴ is R; and X³⁵ is F |
| 407 | | SWGYVX²⁹LIVX³⁰FCLX³¹IFVLX³²YX³³X³⁴X³⁵F |
| 408 | | YVX²⁹LIVX³⁰FCLX³¹IFVLX³²YX³³X³⁴X³⁵F |
| 409 | | FRSWGYVX²⁹LIVX³⁰FCLX³¹IFVLX³²YX³³X³⁴X³⁵F |
| 419 | Generic transmembrane domain for HEMO | WGYVX²⁹LIVX³⁰FCLX³¹IFVLX³²YX³³, |
| | protein of Boreoeutheria mammals | wherein |
| | Cf. FIG. 11 | X²⁹ is L; X³⁰ is L; X³¹ is F; X³² is I; X³³ is V; or |
| | HUM, CPZ, GOR, ORA, GIB, MAC, BAB, AGM, | X²⁹ is L; X³⁰ is L; X³¹ is F; X³² is I; X³³ is V; or |
| | COL, LAN, RHI, MAR, SQM, SPI, SAK | X²⁹ is L; X³⁰ is L; X³¹ is F; X³² is I; X³³ is V; or |
| | start position = 490, 489, 492 or 487 | X²⁹ is L; X³⁰ is F; X³¹ is I; X³² is I; X³³ is V; or |
| | end position = 509 | X²⁹ is L; X³⁰ is F; X³¹ is I; X³² is I; X³³ is I; or |
| | | X²⁹ is L; X³⁰ is F; X³¹ is I; X³² is T; X³³ is V; or |
| | | X²⁹ is F; X³⁰ is F; X³¹ is I; X³² is I; X³³ is V |
| 420 | | SWGYVX²⁹LIVX³⁰FCLX³¹IFVLX³²YX³³ |
| 421 | | YVX²⁹LIVX³⁰FCLX³¹IFVLX³²YX³³ |
| 422 | | FRSWGYVX²⁹LIVX³⁰FCLX³¹IFVLX³²YX³³ |
| 423 | Generic transmembrane domain for HEMO | WGYVX²⁹LIVX³⁰FCLX³¹IFVLX³²YX³³X³⁴X³⁵FX⁵⁰, |
| | protein of Boreoeutheria mammals | wherein |
| | HUM, CPZ, GOR, ORA, GIB, MAC, BAB, AGM, | X²⁹ is L; X³⁰ is L; X³¹ is F; X³² is I; X³³ is V; X³⁴ is R; X³⁵ is V; and X⁵⁰ is R or G; or |
| | COL, LAN, RHI, MAR, SQM, SPI, SAK | X²⁹ is L; X³⁰ is L; X³¹ is F; X³² is I; X³³ is V; X³⁴ is H; X³⁵ is V; and X⁵⁰ is R; or |
| | Cf. FIG. 11B | X²⁹ is L; X³⁰ is L; X³¹ is F; X³² is I; X³³ is V; X³⁴ is H; X³⁵ is I; and X⁵⁰ is H; or |
| | start position = aa position 490, 489, 492 or | X²⁹ is L; X³⁰ is F; X³¹ is I; X³² is I; X³³ is V; X³⁴ is R; X³⁵ is F; and X⁵⁰ is H; or |
| | 487 | X²⁹ is L; X³⁰ is F; X³¹ is I; X³² is I; X³³ is I; X³⁴ is R; X³⁵ is F; and X⁵⁰ is H; or |
| | end position = 513 | X²⁹ is L; X³⁰ is F; X³¹ is I; X³² is T; X³³ is V; X³⁴ is R; X³⁵ is F; and X⁵⁰ is H; or |
| | | X²⁹ is F; X³⁰ is F; X³¹ is I; X³² is I; X³³ is V; X³⁴ is R; X³⁵ is F and X⁵⁰ is H |
| 424 | | SWGYVX²⁹LIVX³⁰FCLX³¹IFVLX³²YX³³X³⁴X³⁵FX⁵⁰ |
| 425 | | YVX²⁹LIVX³⁰FCLX³¹IFVLX³²YX³³X³⁴X³⁵FX⁵⁰ |
| 426 | | FRSWGYVX²⁹LIVX³⁰FCLX³¹IFVLX³²YX³³X³⁴X³⁵FX⁵⁰ |
| 6 | Human HEMO intracellular domain | 513-563 from SEQ ID NO: 1 |
| 417 | start position 513, 510 or 514 | 510-563 from SEQ ID NO: 1 |
| 418 | end position 563 | 514-563 from SEQ ID NO: 1 |
| 411-413 | Generic sequence of intracellular domain for | X³⁸KSX³⁹RSX⁴⁰NSQX⁴¹LX⁴²X⁴³X⁴⁴LSPQQSA; or |
| | HEMO protein of Boreoeutheria | X³⁶X³⁷FX³⁸KSX³⁹RSX⁴⁰NSQX⁴¹LX⁴²X⁴³X⁴⁴LSPQQSA; or |
| | from HUM to SAK of FIGS. 11A-11B | KSX³⁹RSX⁴⁰NSQX⁴¹LX⁴²X⁴³X⁴⁴LSPQQSA; |
| | start position 513, 510 or 514 | wherein |
| | end position 563 | X³⁶ is R or H |
| | | X³⁷ is V or I or F |
| | | X³⁸ is R or G or H |
| | | X³⁹ is R or H |
| | | X⁴⁰ is L or F |
| | | X⁴¹ is P or T |
| | | X⁴² is N or Y or F |
| | | X⁴³ is L or P |
| | | X⁴⁴ is A or V |
| 414-416 | Generic sequence of intracellular domain for | X³⁸KSX³⁹RSX⁴⁰NSQX⁴¹LX⁴²X⁴³X⁴⁴LSPQQSAQX⁴⁵LX⁴⁶X⁴⁷ETSCQVSNRAMKX⁴⁸X⁴⁹TTHQYDTSLL; or |
| | HEMO protein of Boreoeutheria | X³⁶X³⁷FX³⁸KSX³⁹RSX⁴⁰NSQX⁴¹LX⁴²X⁴³X⁴⁴LSPQQSAQX⁴⁵LX⁴⁶X⁴⁷ETSCQVSNRAMKX⁴⁸X⁴⁹TTHQYDTSLL; |
| | from HUM to RHI of FIGS. 11A-11B | or |
| | start position 513, 510 or 514 | KSX³⁹RSX⁴⁰NSQX⁴¹LX⁴²X⁴³X⁴⁴LSPQQSAQX⁴⁵LX⁴⁶X⁴⁷ETSCQVSNRAMKX⁴⁸X⁴⁹TTHQYDTSLL; |
| | end position 563 | wherein |
| | | X³⁶ is R or H |
| | | X³⁷ is V or I or F |
| | | X³⁸ is R or G or H |
| | | X³⁹ is R or H |
| | | X⁴⁰ is L or F |
| | | X⁴¹ is P or T |
| | | X⁴² is N or Y or F |
| | | X⁴³ is L or P |
| | | X⁴⁴ is A or V |
| | | X⁴⁵ is L or Q |
| | | X⁴⁶ is L or I |
| | | X⁴⁷ is V or N |
| | | X⁴⁸ is G or E |
| | | X⁴⁹ is L or P |
| 8 | Example of fragment of human HEMO | 123-286 from SEQ ID NO: 1 |
| | ectodomain, which may be used for mAb | |
| | production (cf. example below) | |
| 150 | Shedding/cleavage region in the human | 380-480 from SEQ ID NO: 1 |
| 622 | HEMO protein | 380-420 from SEQ ID NO: 1 |
| 623 | | 428-438 from SEQ ID NO: 1 |
| 624 | | 450-480 from SEQ ID NO: 1 |
| 9-10 | Human HEMO major soluble ectodomain | 27-X¹ from SEQ ID NO: 1 wherein X¹ is aa position 432 or 433 |
| 183-184 | fragment (produced by shedding) | 25- X¹ from SEQ ID NO: 1 wherein X¹ is aa position 432 or 433 |
| 185-186 | End position 432 or 433 | 26- X¹ from SEQ ID NO: 1 wherein X¹ is aa position 432 or 433 |
| | Start position 27, 25 or 26 | |
| 11-12 | Human HEMO ectodomain fragment, which | X²-489 from SEQ ID NO: 1 wherein X² is aa position 433 or 434 |
| 189-190 | is retained on the cell surface after shedding | X²-488 from SEQ ID NO: 1 wherein X² is aa position 433 or 434 |
| 191-192 | of the major soluble fragment of SEQ ID NO: | X²-491 from SEQ ID NO: 1 wherein X² is aa position 433 or 434 |
| 193-194 | 9, 183 or 185 [SEQ ID NO: 11] or of SEQ ID | X²-486 from SEQ ID NO: 1 wherein X² is aa position 433 or 434 |
| | NO: 10, 184 or 186 [SEQ ID NO: 12] | |
| | Start position 433 or 434 | |
| | End position 489, 488, 491 or 486 | |
| 625-626 | Human HEMO membranar protein after | X²-563 from SEQ ID NO: 1 wherein X² is aa position 433 or 434 |
| | shedding of the major soluble fragment of | |
| | SEQ ID NO: 9, 183 or 185 [SEQ ID NO: 625] or | |
| | of SEQ ID NO: 10, 184 or 186 [SEQ ID NO: | |
| | 626] | |
| | Start position 433 or 434 | |
| | End position 563 | |
| 13-33 | Human HEMO secondary soluble | 27-X³ from SEQ ID NO: 1 wherein X³ = any aa position from among 380-420 |
| 670-689 | ectodomain fragment (produced by | |
| 195-215 | shedding) | 25-X³ from SEQ ID NO: 1 wherein X³ = any aa position from among 380-420 |
| 690-709 | start position 27, 25 or 26 | |
| 216-236 | end position at 380-420 | 26-X³ from SEQ ID NO: 1 wherein X³ = any aa position from among 380-420 |
| 710-729 | | |
| 34-54 | Human HEMO ectodomain fragment, which | X⁴-489 from SEQ ID NO: 1 wherein X⁴ = any aa position from among 381-421 |
| 730-749 | is retained on the cell surface after shedding | |
| | of the secondary soluble fragment of SEQ ID | |
| 237-257 | NO: 13-33, 195-215 or 216-236 | X⁴-488 from SEQ ID NO: 1 wherein X⁴ = any aa position from among 381-421 |
| 750-769 | start position at 381-421 | |
| 258-278 | end position 489, 488, 491 or 486 | X⁴-491 from SEQ ID NO: 1 wherein X⁴ = any aa position from among 381-421 |
| 770-789 | | |
| 279-299 | | X⁴-486 from SEQ ID NO: 1 wherein X⁴ = any aa position from among 381-421 |
| 790-809 | | |
| 627-647 | Human HEMO membranar protein after | X⁴-563 from SEQ ID NO: 1 wherein X⁴ = any aa position from among 381-421 |
| 810-829 | shedding of the secondary soluble fragment | |
| | of SEQ ID NO: 13-33, 195-215 or 216-236 | |
| | start position at 381-421 | |
| | end position 563 | |
| 55-75 | Alternative human HEMO secondary soluble | 27-X⁵ from SEQ ID NO: 1 wherein X⁵ = any aa position from among 450-480 |
| 830-839 | ectodomain fragment (produced by | |
| 300-320 | shedding) | 25-X⁵ from SEQ ID NO: 1 wherein X⁵ = any aa position from among 450-480 |
| 840-849 | start position 27, 25 or 26 | |
| 321-341 | end position at 450-480 | 26-X⁵ from SEQ ID NO: 1 wherein X⁵ = any aa position from among 450-480 |
| 850-859 | | |
| 76-96 | Human HEMO ectodomain fragment, which | X⁶-489 from SEQ ID NO: 1 wherein X⁶ = any aa position from among 451-481 |
| 860-869 | is retained on the cell surface after shedding | |
| 342-362 | of the alternative secondary soluble fragment | X⁶-488 from SEQ ID NO: 1 wherein X⁶ = any aa position from among 451-481 |
| 870-879 | of SEQ ID NO: 55-75, 300-320 or 321-341 | |
| 363-383 | start position at 451-481 | X⁶-491 from SEQ ID NO: 1 wherein X⁶ = any aa position from among 451-481 |
| 880-889 | end position 489, 488, 491 or 486 | |
| 384-404 | | X⁶-486 from SEQ ID NO: 1 wherein X⁶ = any aa position from among 451-481 |
| 890-899 | | |
| 648-668 | Human HEMO membranar protein after | X⁶-563 from SEQ ID NO: 1 wherein X⁶ = any aa position from among 451-481 |
| 900-909 | shedding of the alternative secondary soluble | |
| | fragment of SEQ ID NO: 55-75, 300-320 or | |
| | 321-341 | |
| | start position at 451-481 | |
| | end position 563 | |
| 991-1001 | Alternative human HEMO secondary soluble | 25-X⁷ from SEQ ID NO: 1 wherein X⁷ = any aa position from among 421-431 |
| 1002-1017 | ectodomain fragment (produced by | 25-X⁷ from SEQ ID NO: 1 wherein X⁷ = any aa position from among 434-449 |
| 1018-1028 | shedding) | 26-X⁷ from SEQ ID NO: 1 wherein X⁷ = any aa position from among 421-431 |
| 1029-1044 | start position 25, 26 or 27 | |
| | end position at 421-431 and 434-449 | 26-X⁷ from SEQ ID NO: 1 wherein X⁷ = any aa position from among 434-449 |
| 1045-1055 | | 27-X⁷ from SEQ ID NO: 1 wherein X⁷ = any aa position from among 421-431 |
| 1056-1071 | | 27-X⁷ from SEQ ID NO: 1 wherein X⁷ = any aa position from among 434-449 |
| 97-128 | Primers | cf. Table 4 |
| 152 | Nucleic acid coding for human HEMO protein | Coding for human HEMO of SEQ ID NO: 1 |
| | (CDS) | |
| 153-167 | Nucleic acid coding for non-human HEMO | Boreoeutheria mammals CPZ, GOR, ORA, GIB, MAC, BAB, AGM, COL, LAN, RHI, MAR, SQM, |
| | protein | SPI, SAK, CAT cf. FIGS. 11A, 11B, 12A, 12B |
| 669 | Human HEMO promoter | chr4: 52750959-52751715 757bp |
| 910 | Human HEMO ectodomain | 25-487 from SEQ ID NO: 1 |
| 911 | (without the signal peptide) | 25-490 from SEQ ID NO: 1 |
| 912 | start position 25, 26 or 27 | 25-492 from SEQ ID NO: 1 |
| 913 | end position 487, 490 or 492 | 26-487 from SEQ ID NO: 1 |
| 914 | | 26-490 from SEQ ID NO: 1 |
| 915 | | 26-492 from SEQ ID NO: 1 |
| 916 | | 27-487 from SEQ ID NO: 1 |
| 917 | | 27-490 from SEQ ID NO: 1 |
| 918 | | 27-492 from SEQ ID NO: 1 |
| 919 | HTM5 | 387-471 from SEQ ID NO: 1 |
| 920 | Streptag-HTM5 peptide | (StrepTaglinker(GGGS)x3)-StrepTag)-HTM5 |
| 921 | SU-HEMO | 1-351 from SEQ ID NO: 1 |
| 922 | TM-HEMO | internal deletion from aa 34 to 352 = 1-33 + 353-563 from SEQ ID NO: 1 |
| 923 | post-SHED HEMO | internal deletion from aa 34 to 432 = 1-33 + 433-563 from SEQ ID NO: 1 |
| 924-939 | human HEMO ectodomain fragments | see Table 7 |
| 981-987 | | |
| 988 | HST5 | 280-400 from SEQ ID NO: 1 |
| 989 | Streptag-HST5 peptide | (StrepTaglinker(GGGS)x3)-StrepTag)-HST5 |
| 990 | 57 amino acids of the ectodomain part of the | 433-489 from SEQ ID NO: 1 (see example 3) |
| | HEMO protein | |
| 940 | Cat HEMO signal peptide | 1-22 from SEQ ID NO: 143 |
| 941 | start position 1 | 1-23 from SEQ ID NO: 143 |
| 942 | end position 22, 23, 24, 25 or 26 | 1-24 from SEQ ID NO: 143 |
| 943 | | 1-25 from SEQ ID NO: 143 |
| 944 | | 1-26 from SEQ ID NO: 143 |
| 945 | Cat HEMO ectodomain | 23-485 from SEQ ID NO: 143 |
| 946 | start position 23, 24, 25, 26 or 27 | 23-486 from SEQ ID NO: 143 |
| 947 | end position 485, 486, 487, 488, 489, 490 or | 23-487 from SEQ ID NO: 143 |
| 948 | 491 | 23-488 from SEQ ID NO: 143 |
| 949 | | 23-489 from SEQ ID NO: 143 |
| 950 | | 23-490 from SEQ ID NO: 143 |
| 951 | | 23-491 from SEQ ID NO: 143 |
| 952 | | 24-485 from SEQ ID NO: 143 |
| 953 | | 24-486 from SEQ ID NO: 143 |
| 954 | | 24-487 from SEQ ID NO: 143 |
| 955 | | 24-488 from SEQ ID NO: 143 |
| 956 | | 24-489 from SEQ ID NO: 143 |
| 957 | | 24-490 from SEQ ID NO: 143 |
| 958 | | 24-491 from SEQ ID NO: 143 |
| 606 | Cat HEMO ectodomain (continued) | 25-485 from SEQ ID NO: 143 |
| 959 | start position 23, 24, 25, 26 or 27 | 25-486 from SEQ ID NO: 143 |
| 960 | end position 485, 486, 487, 488, 489, 490 or | 25-487 from SEQ ID NO: 143 |
| 516 | 491 | 25-488 from SEQ ID NO: 143 |
| 471 | | 25-489 from SEQ ID NO: 143 |
| 961 | | 25-490 from SEQ ID NO: 143 |
| 561 | | 25-491 from SEQ ID NO: 143 |
| 621 | | 26-485 from SEQ ID NO: 143 |
| 962 | | 26-486 from SEQ ID NO: 143 |
| 963 | | 26-487 from SEQ ID NO: 143 |
| 531 | | 26-488 from SEQ ID NO: 143 |
| 486 | | 26-489 from SEQ ID NO: 143 |
| 964 | | 26-490 from SEQ ID NO: 143 |
| 576 | | 26-491 from SEQ ID NO: 143 |
| 591 | | 27-485 from SEQ ID NO: 143 |
| 965 | | 27-486 from SEQ ID NO: 143 |
| 966 | | 27-487 from SEQ ID NO: 143 |
| 501 | | 27-488 from SEQ ID NO: 143 |
| 456 | | 27-489 from SEQ ID NO: 143 |
| 967 | Cat HEMO ectodomain (continued and end) | 27-490 from SEQ ID NO: 143 |
| 546 | start position 23, 24, 25, 26 or 27 | 27-491 from SEQ ID NO: 143 |
| | end position 485, 486, 487, 488, 489, 490 or | |
| | 491 | |
| 968 | Cat CWLC motif | 44-47 from SEQ ID NO: 143 |
| 969 | Cat Furin motif | 352-355 from SEQ ID NO: 143 |
| 970 | Cat ImmunoSuppresive Domaine (ISD) | 418-433 from SEQ ID NO: 143 |
| 971 | Cat HEMO C-X6-CC motif | 434-442 from SEQ ID NO: 143 |
| 972 | Cat HEMO transmembrane domain | 486-510 from SEQ ID NO: 143 |
| 973 | start position 486, 487, 488, 489, 490, 491 or | 487-510 from SEQ ID NO: 143 |
| 974 | 492 | 488-510 from SEQ ID NO: 143 |
| 975 | end position 510 | 489-510 from SEQ ID NO: 143 |
| 976 | | 490-510 from SEQ ID NO: 143 |
| 977 | | 491-510 from SEQ ID NO: 143 |
| 978 | | 492-510 from SEQ ID NO: 143 |
| 979 | Cat HEMO intracellular domain | 511-578 from SEQ ID NO: 143 |
| | start position 511 | |
| | end position 578 | |
| 980 | Cat HEMO Shedding region | 378-479 from SEQ ID NO: 143 |
| | start position 378 | |
| | end position 479 | |

### BIBLIOGRAPHIC REFERENCES

[0712] Bischof P, Irminger-Finger I (2005) The human cytotrophoblastic cell, a mononuclear chameleon. Int J Biochem Cell Biol 37(1):1-16.
[0713] Blaise S, de Parseval N, Benit L, Heidmann T (2003) Genomewide screening for fusogenic human endogenous retrovirus envelopes identifies syncytin 2, a gene conserved on primate evolution. Proc Natl Acad Sci USA. 100(22):13013-8.
[0714] Blond J L, Lavillette D, Cheynet V, Bouton O, Oriol G, Chapel-Fernandes S, Mandrand B, Mallet F, Cosset F L (2000) An envelope glycoprotein of the human endogenous retrovirus HERV-W is expressed in the human placenta and fuses cells expressing the type D mammalian retrovirus receptor. J Virol. 74(7):3321-9.
[0715] Cho K, Shih L (2009) Ovarian Cancer. Annu Rev Pathol 1(4):287-313.
[0716] Cole L A (2009) New discoveries on the biology and detection of human chorionic gonadotropin. Reprod Biol Endocrinol. 7:8.
[0717] Cornelis G, Vernochet C, Carradec Q, Souquere S, Mulot B, Catzeflis F, Nilsson M A, Menzies B R, Renfree M B, Pierron G, Zeller U, Heidmann O, Dupressoir A, Heidmann T (2015) Retroviral envelope gene captures and syncytin exaptation for placentation in marsupials. Proc Natl Acad Sci USA 112(5):E487-96.
[0718] Deaton A, Bird A (2011) CpG islands and the regulation of transcription. Genes Dev 24(10):1010-22.
[0719] Denner J. (2016) Expression and function of endogenous retroviruses in the placenta. Apmis 124(1-2):31-43.
[0720] Dolnik O, Volchkova V, Garten W, Carbonnelle C, Becker S, Kahnt J, Stroller U, Klenk H D, Volchkov V (2004) Ectodomain shedding of the glycoprotein GP of Ebola virus. Embo J 23(10):2175-84.
[0721] Esnault C, Cornelis G, Heidmann O, Heidmann T (2013) Differential Evolutionary Fate of an Ancestral Primate Endogenous Retrovirus Envelope Gene, the EnvV Syncytin, Captured for a Function in Placentation. PLoS Genet 9(3):1-12.
[0722] Friedli M, Turelli P, Kapopoulou A, Rauwel B, Castro-d N, Rowe H M, Ecco G, Unzu C, Planet E, Lombardo A, Mangeat B, Wildhaber B E, Naldini L, Trono D (2014) Loss of transcriptional control over endogenous retroelements during reprogramming to pluripotency Genome Res 24(8):1251-59.
[0723] Gautier L, Cope L, Bolstad B M, Irizarry R A (2004) Affy—Analysis of Affymetrix GeneChip data at the probe level. Bioinformatics 20(3):307-15.
[0724] Henzy J E, Johnson W E (2013) Pushing the endogenous envelope. Philos Trans R Soc Lond B Biol Sci. 368(1626):20120506.
[0725] Jurka J, Kapitonov V V, Pavlicek A, Klonowski P, Kohany O, Walichiewicz J (2005) Repbase Update, a database of eukaryotic repetitive elements. Cytogenet Genome Res. 110(1-4):462-7.
[0726] Kurman R J, Shih I-M (2016) The Dualistic Model of Ovarian Carcinogenesis. Am J Pathol 186(4):733-47.
[0727] Lavialle C, Cornelis G, Dupressoir A, Esnault C, Heidmann O, Vernochet C, Heidmann T (2013) Paleovirology of “syncytins”, retroviral env genes exapted for a role in placentation. Philos Trans R Soc L B Biol Sci. 368(1626):20120507.
[0728] Lukk M, Kapushesky M, Nikkila J, Parkinson H, Goncalves A, Huber W, Ukkonen E, Brazma A (2010) A global map of human gene expression. Nat Biotechnol 28(4):322-4.
[0729] Maltepe E, Fisher S J (2015) Placenta: the forgotten organ. Annu Rev Cell Dev Biol 31(1):523-52.
[0730] Mangeney M, Renard M, Schlecht-Louf G, Bouallaga I, Heidmann O, Letzelter C, Richaud I, Ducos B, Heidmann T (2007) Placental syncytins: Genetic disjunction between the fusogenic and immunosuppressive activity of retroviral envelope proteins. Proc Natl Acad Sci USA 104(51):20534-9.
[0731] Mi S, Lee X, Li X, Veldman G M, Finnerty H, Racie L, LaVallie E, Tang X Y, Edouard P, Howes S, Keith J C Jr, McCoy J M (2000) Syncytin is a captive retroviral envelope protein involved in human placental morphogenesis. Nature 403 (February):785-9.
[0732] Okazaki I, Nabeshima K (2012) Introduction: MMPs, ADAMs/ADAMTSs research products to achieve big dream. Anticancer Agents Med Chem 12(7):688-706.
[0733] de Parseval N, Lazar V, Casella J-F, Benit L, Heidmann T. Survey of human genes of retroviral origin: identification and transcriptome of the genes with coding capacity for complete envelope proteins. J Virol 2003; 77(19):10414-22.
[0734] Taminau J, Meganck S, Lazar C, Steenhoff D, Coletta a, Molter C, Duque R, de Schaetzen V, Weiss Solis D Y, Bersini H, Nowe A (2012) Unlocking the potential of publicly available microarray data using inSilicoDb and inSilicoMerging R/Bioconductor packages. BMC Bioinformatics 13:335.
[0735] Toth G, Jurka J (1994) Repetitive DNA in and around translocation breakpoints of the Philadelphia chromosome. Gene 140(2):285-8.
[0736] Uhlén M, Fagerberg L, Hallstrom B M, Lindskog C, Oksvold P, Mardinoglu A, Sivertsson A, Kampf C, Sjostedt E, Asplund A, Olsson I, Edlund K, Lundberg E, Navani S, Szigyarto C A, Odeberg J, Djureinovic D, Takanen J O, Hober S, Alm T, Edqvist P H, Berling H, Tegel H, Mulder J, Rockberg J, Nilsson P, Schwenk J M, Hamsten M, von Feilitzen K, Forsberg M, Persson L, Johansson F, Zwahlen M, von Heijne G, Nielsen J, Pontén F (2015) Tissue-based map of the human proteome. Science 347(6220):1260419.
[0737] Vargiu L, Rodriguez-Tome P, Sperber G O, Cadeddu M, Grandi N, Blikstad V, Tramontano E, Blomberg J (2016) Classification and characterization of human endogenous retroviruses; mosaic forms are common. Retrovirology 13(1):7.
[0738] Villesen P, Aagaard L, Wiuf C, Pedersen F S (2004) Identification of endogenous retroviral reading frames in the human genome. Retrovirology 1:32.
[0739] Weber S, Saftig P (2012) Ectodomain shedding and ADAMs in development. Development 139(20):3693-709.
[0740] Xue Z, Huang K, Cai C, Cai L, Jiang C Y, Feng Y, Liu Z, Zeng Q, Cheng L, Sun Y E, Liu J Y, Horvath S, Fan G (2013) Genetic programs in human and mouse early embryos revealed by single-cell RNA sequencing. Nature 500(7464):593-7.
[0741] Yan L, Yang M, Guo H, Yang L, Wu J, Li R, Liu P, Lian Y, Zheng X, Yan J, Huang J, Li M, Wu X, Wen L, Lao K, Li R, Qiao J, Tang F (2013) Single-cell RNA-Seq profiling of human preimplantation embryos and embryonic stem cells. Nat Struct Mol Biol 20(9):1131-9.

1. A polypeptide consisting of a N-terminal fragment of the ectodomain of an endogenous Boreoeutheria retroviral Env protein,
a. wherein said retroviral Env protein is
the amino acid sequence of SEQ ID NO: 1; or
the amino acid sequence which is at least 59% identical to SEQ ID NO: 1, more particularly the amino acid sequence which is at least 60%, 65%, 70%, 75%, 80%, 81%, 82%, 83%, 84%, 85%, 86%, 87%, 88%, 89%, 90%, 91%, 92%, 93%, 94%, 95%, 96%, 97%, 98% or 99% identical to SEQ ID NO: 1; or
a sequence chosen from among the sequences of SEQ ID NOs: 129-143,
b. wherein said ectodomain, without its signal peptide or fragment thereof, of said retroviral Env protein consists of:
443-468 or 443-467 amino acids of said sequences which more particularly comprise in N-term to C-term orientation
i. a CWLC amino acid sequence,
ii. an amino acid sequence chosen from among the CTQG sequence, the CTQR sequence, the CIQR sequence, the RTQR sequence and the RTKR sequence, and
iv. an amino acid sequence of SEQ ID NO: 149;
wherein the ectodomain of said retroviral Env protein consists more particularly of a sequence chosen from among the sequences of SEQ ID NOs: 178, 912 and 547-561, and the sequences, which are the fragments of at least one of the sequences of SEQ ID NOs: 172, 911 and 457-471, and which differ by at most 7 or 8 amino acids in length of at least one of the sequences of SEQ ID NOs: 178, 912 and 547-561,
wherein the sequence of said N-terminal fragment:
consists of a number of amino acids lower than said ectodomain, said lower number being chosen from among 344-457 or 374-446,
starts at the N-terminal extremity of said ectodomain; and
comprises said sequence of b.i. and said sequence of b.ii.

2. The polypeptide consisting of a N-terminal fragment of the ectodomain of an endogenous Boreoeutheria retroviral Env protein according to claim 1,
a. wherein said retroviral Env protein is
the amino acid sequence of SEQ ID NO: 1; or
the amino acid sequence which is at least 59% identical to SEQ ID NO: 1, more particularly the amino acid sequence which is at least 60%, 65%, 70%, 75%, 80%, 81%, 82%, 83%, 84%, 85%, 86%, 87%, 88%, 89%, 90%, 91%, 92%, 93%, 94%, 95%, 96%, 97%, 98% or 99% identical to SEQ ID NO: 1; or
a sequence chosen from among the sequences of SEQ ID NOs: 129-142,
b. wherein said ectodomain, without its signal peptide or fragment thereof, of said retroviral Env protein consists of:
443-468 or 443-467 amino acids of said sequences which more particularly comprise in N-term to C-term orientation
i. a CWLC amino acid sequence,
ii. an amino acid sequence chosen from among the CTQG sequence, the CTQR sequence, the CIQR sequence and the RTKR sequence,
iii. an amino acid sequence of SEQ ID NO: 148, and
iv. an amino acid sequence of SEQ ID NO: 149;
wherein the ectodomain of said retroviral Env protein consists more particularly of a sequence chosen from among the sequences of SEQ ID NOs: 178, 912 and 547-560, and the sequences, which are the fragments of at least one of the sequences of SEQ ID NOs: 172, 911 and 457-470, and which differ by at most 7 or 8 amino acids in length of at least one of the sequences of SEQ ID NOs: 178, 912 and 547-560,
wherein the sequence of said N-terminal fragment:
consists of a number of amino acids lower than said ectodomain, said lower number being chosen from among 344-457 or 374-446,
starts at the N-terminal extremity of said ectodomain; and
comprises said sequence of b.i. and said sequence of b.ii.

3. The polypeptide consisting of a N-terminal fragment of the ectodomain of an endogenous cat retroviral Env protein according to claim 1,
a. wherein said retroviral Env protein is
the amino acid sequence of SEQ ID NO: 143; or
the amino acid sequence which is at least 80% identical to SEQ ID NO: 143, more particularly the amino acid sequence which is at least 81%, 82%, 83%, 84%, 85%, 86%, 87%, 88%, 89%, 90%, 91%, 92%, 93%, 94%, 95%, 96%, 97%, 98% or 99% identical to SEQ ID NO: 143,
b. wherein said ectodomain, without its signal peptide or fragment thereof, of said retroviral Env protein consists of 443-468 or 443-467 amino acids of said sequences which more particularly comprise in N-term to C-term orientation
i. a CWLC amino acid sequence,
ii. a RTQR sequence, and
iv. an amino acid sequence of SEQ ID NO: 149;
wherein the ectodomain of said retroviral Env protein consists more particularly of the sequences of SEQ ID NOs: 561 and 951, and the sequences, which are the fragments of the sequences of SEQ ID NOs: 471 and 949, and which differ by at most 7 or 8 amino acids in length of at least one of the sequences of SEQ ID NOs: 561 and 951,
wherein the sequence of said N-terminal fragment:
consists of a number of amino acids lower than said ectodomain, said lower number being chosen from among 352-457 or 374-446;
starts at the N-terminal extremity of said ectodomain; and
comprises said sequence of b.i. and said sequence of b.ii.

4. The polypeptide consisting of a N-terminal fragment of the ectodomain of an endogenous Boreoeutheria retroviral Env protein according to claim 1,
a. wherein said retroviral Env protein is
the amino acid sequence of SEQ ID NO: 1; or
the amino acid sequence which is at least 59% identical to SEQ ID NO: 1, more particularly the amino acid sequence which is at least 60%, 65%, 70%, 75%, 80%, 81%, 82%, 83%, 84%, 85%, 86%, 87%, 88%, 89%, 90%, 91%, 92%, 93%, 94%, 95%, 96%, 97%, 98% or 99% identical to SEQ ID NO: 1; or
a sequence chosen from among the sequences of SEQ ID NOs: 129-142,
b. wherein said ectodomain, without its signal peptide or fragment thereof, of said retroviral Env protein consists of:
443-468 or 443-467 amino acids of said sequences which more particularly comprise in N-term to C-term orientation
i. a CWLC amino acid sequence,
ii. an amino acid sequence chosen from among the CTQG sequence, the CTQR sequence, the CIQR sequence and the RTKR sequence,
iii. an amino acid sequence of SEQ ID NO: 148, and
iv. an amino acid sequence of SEQ ID NO: 149;
wherein the ectodomain of said retroviral Env protein consists more particularly of a sequence chosen from among the sequences of SEQ ID NOs: 178, 912 and 547-560, and the sequences, which are the fragments of at least one of the sequences of SEQ ID NOs: 172, 911 and 457-470, and which differ by at most 7 or 8 amino acids in length of at least one of the sequences of SEQ ID NOs: 178, 912 and 547-560,
wherein the sequence of said N-terminal fragment:
consists of a number of amino acids lower than said ectodomain, said lower number being chosen from among 344-457 or 374-446,
starts at the N-terminal extremity of said ectodomain; and
comprises said sequence of b.i. and said sequence of b.ii,
wherein the sequence of said N-terminal fragment consists of a number of amino acids lower than said ectodomain, said lower number being chosen from among 354-456 or 374-446.

5. The polypeptide consisting of a N-terminal fragment of the ectodomain of an endogenous Boreoeutheria retroviral Env protein according to claim 1,
a. wherein said retroviral Env protein is
the amino acid sequence of SEQ ID NO: 1; or
the amino acid sequence which is at least 59% identical to SEQ ID NO: 1, more particularly the amino acid sequence which is at least 60%, 65%, 70%, 75%, 80%, 81%, 82%, 83%, 84%, 85%, 86%, 87%, 88%, 89%, 90%, 91%, 92%, 93%, 94%, 95%, 96%, 97%, 98% or 99% identical to SEQ ID NO: 1; or
a sequence chosen from among the sequences of SEQ ID NOs: 129-142,
b. wherein said ectodomain, without its signal peptide or fragment thereof, of said retroviral Env protein consists of:
443-468 or 443-467 amino acids of said sequences which more particularly comprise in N-term to C-term orientation
i. a CWLC amino acid sequence,
ii. an amino acid sequence chosen from among the CTQG sequence, the CTQR sequence, the CIQR sequence and the RTKR sequence,
iii. an amino acid sequence of SEQ ID NO: 148, and
iv. an amino acid sequence of SEQ ID NO: 149;
wherein the ectodomain of said retroviral Env protein consists more particularly of a sequence chosen from among the sequences of SEQ ID NOs: 178, 912 and 547-560, and the sequences, which are the fragments of at least one of the sequences of SEQ ID NOs: 172, 911 and 457-470, and which differ by at most 7 or 8 amino acids in length of at least one of the sequences of SEQ ID NOs: 178, 912 and 547-560,
wherein the sequence of said N-terminal fragment:
consists of a number of amino acids lower than said ectodomain, said lower number being chosen from among 344-457 or 374-446,
starts at the N-terminal extremity of said ectodomain; and
comprises said sequence of b.i. and said sequence of b.ii,
wherein
a. the C-terminal extremity of said N-terminal fragment is located from amino acid at position 380 to amino acid at position 480 of the sequences SEQ ID NOs: 1, 129-134 and 136-137 and before the N-terminal extremity of the transmembrane domain of the sequences SEQ ID NOs: 1, 129-134 and 136-137 at a location of 6 to 112 amino acids upstream the N-terminal extremity of the transmembrane domain of the sequences SEQ ID NOs: 1, 129-134 and 136-137; or
b. the C-terminal extremity of said N-terminal fragment is located from amino acid at position 379 to amino acid at position 479 of the sequence SEQ ID NO: 135 and before the N-terminal extremity of the transmembrane domain of the sequence SEQ ID NO: 135 at a location of 6 to 112 amino acids upstream the N-terminal extremity of the transmembrane domain of the sequence SEQ ID NO: 135; or
c. the C-terminal extremity of said N-terminal fragment is located from amino acid at position 380 to amino acid at position 479 of the sequence SEQ ID NO: 138 and before the N-terminal extremity of the transmembrane domain of the sequence SEQ ID NO: 138 at a location of 6 to 111 amino acids upstream the N-terminal extremity of the transmembrane domain of the sequence SEQ ID NO: 138; or
d. the C-terminal extremity of said N-terminal fragment is located from amino acid at position 380 to amino acid at position 476 of the sequences SEQ ID NOs: 139-140 and 142 and before the N-terminal extremity of the transmembrane domain of the sequences SEQ ID NOs: 139-140 and 142 at a location of 3 to 105 amino acids upstream the N-terminal extremity of the transmembrane domain of the sequences SEQ ID NOs: 139-140 and 142; or
e. the C-terminal extremity of said N-terminal fragment is located from amino acid at position 370 to amino acid at position 466 of the sequence SEQ ID NO: 141 and before the N-terminal extremity of the transmembrane domain of the sequence SEQ ID NO: 141 at a location of 3 to 105 amino acids upstream the N-terminal extremity of the transmembrane domain of the sequence SEQ ID NO: 141.

6. The polypeptide consisting of a N-terminal fragment of the ectodomain of an endogenous human retroviral Env protein according to claim 1,
a. wherein said human retroviral Env protein is
the amino acid sequence of SEQ ID NO: 1; or
the amino acid sequence which is at least 80% identical to SEQ ID NO: 1, more particularly the amino acid sequence which is at least 81%, 82%, 83%, 84%, 85%, 86%, 87%, 88%, 89%, 90%, 91%, 92%, 93%, 94%, 95%, 96%, 97%, 98% or 99% identical to SEQ ID NO: 1,
b. wherein said ectodomain, without its signal peptide or fragment thereof, of said retroviral Env protein consists of:
443-468 or 443-467 amino acids of said sequences which more particularly comprise in N-term to C-term orientation
i. a CWLC amino acid sequence,
ii. an amino acid sequence chosen from among the CTQG sequence, the CTQR sequence, the CIQR sequence and the RTKR sequence,
iii. an amino acid sequence of SEQ ID NO: 148, and
iv. an amino acid sequence of SEQ ID NO: 149;
wherein the ectodomain of said human retroviral Env protein consists more particularly of:
a sequence chosen from among the sequences of SEQ ID NOs: 178 and 912 and the sequences, which are the fragments of at least one of the sequences of SEQ ID NOs: 172 and 911, and which differ by at most 7 or 8 amino acids in length of at least one of the sequences of SEQ ID NO: 178 and 912,
wherein the sequence of said N-terminal fragment:
consists of a number of amino acids lower than said ectodomain, said lower number being chosen from among 354-456 or 374-446,
starts at the N-terminal extremity of said ectodomain;
comprises said sequence of b.i. and said sequence of b.ii.; and
the C-terminal extremity of said N-terminal fragment is located from amino acid at position 380 to amino acid at position 480 of the sequence SEQ ID NO: 1 and before the N-terminal extremity of the transmembrane domain of the sequence SEQ ID NO: 1 at a location of 6 to 112 amino acids upstream the N-terminal extremity of the transmembrane domain of the sequence SEQ ID NO: 1.

7. The polypeptide of claim 1, wherein the sequence of the N-terminal fragment of said ectodomain comprises a fragment of, but not a full-length sequence of, an amino acid sequence of SEQ ID NO: 148;
more particularly wherein the sequence of the N-terminal fragment of said ectodomain comprises or consists of a sequence chosen from among the sequences of SEQ ID NOs: 9-10, 183-184 and 185-186.

8. The polypeptide of claim 1,
a. wherein the sequence of the N-terminal fragment of said ectodomain does not comprise the sequence of an amino acid sequence of SEQ ID NO: 148, and does not comprise any fragment of an amino acid sequence of SEQ ID NO: 148,
more particularly wherein the sequence of the N-terminal fragment of said ectodomain comprises or consists of a sequence chosen from among the sequences of SEQ ID NO: 13-33, 670-689, 195-215, 690-709, 216-236 and 710-729;
or
b. wherein the sequence of the N-terminal fragment of said ectodomain comprises the sequence of an amino acid sequence of SEQ ID NO: 148,
more particularly wherein the sequence of the N-terminal fragment of said ectodomain comprises or consists of a sequence chosen from among the sequences of SEQ ID NOs: 55-75, 830-839, 300-320, 840-849, 321-341 and 850-859.

9. The polypeptide of claim 1,
wherein the sequence of the N-terminal fragment of said ectodomain comprises or consists of a sequence chosen from among the sequences of SEQ ID NOs: 9-10, 184-186 and 991-1071.

10. A product, wherein said product is:
a. an antibody, or
b. a monoclonal antibody, more particularly the monoclonal antibody which is produced by the hybridoma deposited at the CNCM under accession number I-5211, or
c. a Fab, Fab′ or F(ab)2 fragment, or
d. a scFv, or
e. a sdAb, or
f. the variable domain of a sdAb,
and wherein said product is optionally linked to at least one drug, and wherein said product specifically binds to the polypeptide of claim 1.

11. A kit which comprises a product, wherein said product is used in at least one of the following five uses:
a. the detection of the appearance of a tumor or the following of the evolution of a tumor in a subject, wherein said subject is a Boreoeutheria;
and/or
b. the determination of the histotype, grade or stage of a tumor, wherein said cancer is an ovarian cancer, an uterine cancer, a cervical cancer, a gestational cancer, a breast cancer, a lung cancer, a stomach cancer, a colon cancer, a liver cancer, a kidney cancer, a prostate cancer, an urothelial cancer, a germ cell cancer, a brain cancer, a head and neck cancer, a pancreatic cancer, a thyroid cancer, a thymus cancer, a skin cancer, a bone cancer or a bone marrow cancer;
and/or
c. the detection of a defect in the placentation of a pregnant subject, more particularly a placentation defect placing said pregnant subject at risk of placental abruption, pre-eclampsia or eclampsia;
and/or
d. the purification or isolation of circulating cells of a Boreoeutheria, more particularly for purifying or isolating Boreoeutheria circulating cells, which are tumor cells, or tumor stem cells, or placental cells;
and/or
e. the purification or isolation of non-circulating cells of a Boreoeutheria, more particularly for purifying or isolating non-circulating cells in a fresh tumor or biopsy sample from a Boreoeutheria, and
wherein said product is the product of claim 10, and wherein said product is optionally linked or bound to a detection label.

The application's sequence listing, which the Patent Office published only in electronic form, follows.

SEQUENCE LISTING (1071 sequences)

SEQ ID NO: 1 - protein, 563 aa, Homo sapiens
MGSLSNYALLQLTLTAFLTILVQPQHLLAPVFRTLSILTNQSNCWLCEHLDNAEQPELVFVPASASTWWTYSGQWMYERVWYPQAEVQNHSTSSYRKVTWHWEASMEAQGLSFAQVRLLEGNFSLCVENKNGSGPFLGNIPKQYCNQILWFDSTDGTFMPSIDVTNESRNDDDDTSVCLGTRQCSWFAGCTNRTWNSSAVPLIGLPNTQDYKWVDRNSGLTWSGNDTCLYSCQNQTKGLLYQLFRNLFCSYGLTEAHGKWRCADASITNDKGHDGHRTPTWWLTGSNLTLSVNNSGLFFLCGNGVYKGFPPKWSGRCGLGYLVPSLTRYLTLNASQITNLRSFIHKVTPHRCTQGDTDNPPLYCNPKDNSTIRALFPSLGTYDLEKAILNISKAMEQEFSATKQTLEAHQSKVSSLASASRKDHVLDIPTTQRQTACGTVGKQCCLYINYSEEIKSNIQRLHEASENLKNVPLLDWQGIFAKVGDWFRSWGYVLLIVLFCLFIFVLIYVRVFRKSRRSLNSQPLNLALSPQQSAQLLVSETSCQVSNRAMKGLTTHQYDTSLL

SEQ ID NO: 2 - protein, 26 aa, Homo sapiens
MGSLSNYALLQLTLTAFLTILVQPQH

SEQ ID NO: 3 - protein, 537 aa, Homo sapiens
LLAPVFRTLSILTNQSNCWLCEHLDNAEQPELVFVPASASTWWTYSGQWMYERVWYPQAEVQNHSTSSYRKVTWHWEASMEAQGLSFAQVRLLEGNFSLCVENKNGSGPFLGNIPKQYCNQILWFDSTDGTFMPSIDVTNESRNDDDDTSVCLGTRQCSWFAGCTNRTWNSSAVPLIGLPNTQDYKWVDRNSGLTWSGNDTCLYSCQNQTKGLLYQLFRNLFCSYGLTEAHGKWRCADASITNDKGHDGHRTPTWWLTGSNLTLSVNNSGLFFLCGNGVYKGFPPKWSGRCGLGYLVPSLTRYLTLNASQITNLRSFIHKVTPHRCTQGDTDNPPLYCNPKDNSTIRALFPSLGTYDLEKAILNISKAMEQEFSATKQTLEAHQSKVSSLASASRKDHVLDIPTTQRQTACGTVGKQCCLYINYSEEIKSNIQRLHEASENLKNVPLLDWQGIFAKVGDWFRSWGYVLLIVLFCLFIFVLIYVRVFRKSRRSLNSQPLNLALSPQQSAQLLVSETSCQVSNRAMKGLTTHQYDTSLL

SEQ ID NO: 4 - protein, 463 aa, Homo sapiens
LLAPVFRTLSILTNQSNCWLCEHLDNAEQPELVFVPASASTWWTYSGQWMYERVWYPQAEVQNHSTSSYRKVTWHWEASMEAQGLSFAQVRLLEGNFSLCVENKNGSGPFLGNIPKQYCNQILWFDSTDGTFMPSIDVTNESRNDDDDTSVCLGTRQCSWFAGCTNRTWNSSAVPLIGLPNTQDYKWVDRNSGLTWSGNDTCLYSCQNQTKGLLYQLFRNLFCSYGLTEAHGKWRCADASITNDKGHDGHRTPTWWLTGSNLTLSVNNSGLFFLCGNGVYKGFPPKWSGRCGLGYLVPSLTRYLTLNASQITNLRSFIHKVTPHRCTQGDTDNPPLYCNPKDNSTIRALFPSLGTYDLEKAILNISKAMEQEFSATKQTLEAHQSKVSSLASASRKDHVLDIPTTQRQTACGTVGKQCCLYINYSEEIKSNIQRLHEASENLKNVPLLDWQGIFAKVGDWFRS

SEQ ID NO: 5 - protein, 23 aa, Homo sapiens
WGYVLLIVLFCLFIFVLIYVRVF

SEQ ID NO: 6 - protein, 51 aa, Homo sapiens
RKSRRSLNSQPLNLALSPQQSAQLLVSETSCQVSNRAMKGLTTHQYDTSLL

SEQ ID NO: 7 - protein, 17 aa, Homo sapiens
SRKDHVLDIPTTQRQTA

SEQ ID NO: 8 - protein, 164 aa, Homo sapiens
FSLCVENKNGSGPFLGNIPKQYCNQILWFDSTDGTFMPSIDVTNESRNDDDDTSVCLGTRQCSWFAGCTNRTWNSSAVPLIGLPNTQDYKWVDRNSGLTWSGNDTCLYSCQNQTKGLLYQLFRNLFCSYGLTEAHGKWRCADASITNDKGHDGHRTPTWWLTGS

SEQ ID NO: 9 - protein, 406 aa, Homo sapiens
LLAPVFRTLSILTNQSNCWLCEHLDNAEQPELVFVPASASTWWTYSGQWMYERVWYPQAEVQNHSTSSYRKVTWHWEASMEAQGLSFAQVRLLEGNFSLCVENKNGSGPFLGNIPKQYCNQILWFDSTDGTFMPSIDVTNESRNDDDDTSVCLGTRQCSWFAGCTNRTWNSSAVPLIGLPNTQDYKWVDRNSGLTWSGNDTCLYSCQNQTKGLLYQLFRNLFCSYGLTEAHGKWRCADASITNDKGHDGHRTPTWWLTGSNLTLSVNNSGLFFLCGNGVYKGFPPKWSGRCGLGYLVPSLTRYLTLNASQITNLRSFIHKVTPHRCTQGDTDNPPLYCNPKDNSTIRALFPSLGTYDLEKAILNISKAMEQEFSATKQTLEAHQSKVSSLASASRKDHVLDIPTTQ

SEQ ID NO: 10 - protein, 407 aa, Homo sapiens
LLAPVFRTLSILTNQSNCWLCEHLDNAEQPELVFVPASASTWWTYSGQWMYERVWYPQAEVQNHSTSSYRKVTWHWEASMEAQGLSFAQVRLLEGNFSLCVENKNGSGPFLGNIPKQYCNQILWFDSTDGTFMPSIDVTNESRNDDDDTSVCLGTRQCSWFAGCTNRTWNSSAVPLIGLPNTQDYKWVDRNSGLTWSGNDTCLYSCQNQTKGLLYQLFRNLFCSYGLTEAHGKWRCADASITNDKGHDGHRTPTWWLTGSNLTLSVNNSGLFFLCGNGVYKGFPPKWSGRCGLGYLVPSLTRYLTLNASQITNLRSFIHKVTPHRCTQGDTDNPPLYCNPKDNSTIRALFPSLGTYDLEKAILNISKAMEQEFSATKQTLEAHQSKVSSLASASRKDHVLDIPTTQR

SEQ ID NO: 11 - protein, 57 aa, Homo sapiens
RQTACGTVGKQCCLYINYSEEIKSNIQRLHEASENLKNVPLLDWQGIFAKVGDWFRS

SEQ ID NO: 12 - protein, 56 aa, Homo sapiens
QTACGTVGKQCCLYINYSEEIKSNIQRLHEASENLKNVPLLDWQGIFAKVGDWFRS

SEQ ID NO: 13 - protein, 374 aa, Homo sapiens
LLAPVFRTLSILTNQSNCWLCEHLDNAEQPELVFVPASASTWWTYSGQWMYERVWYPQAEVQNHSTSSYRKVTWHWEASMEAQGLSFAQVRLLEGNFSLCVENKNGSGPFLGNIPKQYCNQILWFDSTDGTFMPSIDVTNESRNDDDDTSVCLGTRQCSWFAGCTNRTWNSSAVPLIGLPNTQDYKWVDRNSGLTWSGNDTCLYSCQNQTKGLLYQLFRNLFCSYGLTEAHGKWRCADASITNDKGHDGHRTPTWWLTGSNLTLSVNNSGLFFLCGNGVYKGFPPKWSGRCGLGYLVPSLTRYLTLNASQITNLRSFIHKVTPHRCTQGDTDNPPLYCNPKDNSTIRALFPSLGTYDLEKAILNISKAMEQEFS

SEQ ID NO: 14 - protein, 375 aa, Homo sapiens
LLAPVFRTLSILTNQSNCWLCEHLDNAEQPELVFVPASASTWWTYSGQWMYERVWYPQAEVQNHSTSSYRKVTWHWEASMEAQGLSFAQVRLLEGNFSLCVENKNGSGPFLGNIPKQYCNQILWFDSTDGTFMPSIDVTNESRNDDDDTSVCLGTRQCSWFAGCTNRTWNSSAVPLIGLPNTQDYKWVDRNSGLTWSGNDTCLYSCQNQTKGLLYQLFRNLFCSYGLTEAHGKWRCADASITNDKGHDGHRTPTWWLTGSNLTLSVNNSGLFFLCGNGVYKGFPPKWSGRCGLGYLVPSLTRYLTLNASQITNLRSFIHKVTPHRCTQGDTDNPPLYCNPKDNSTIRALFPSLGTYDLEKAILNISKAMEQEFSA

SEQ ID NO: 15 - protein, 376 aa, Homo sapiens
LLAPVFRTLSILTNQSNCWLCEHLDNAEQPELVFVPASASTWWTYSGQWMYERVWYPQAEVQNHSTSSYRKVTWHWEASMEAQGLSFAQVRLLEGNFSLCVENKNGSGPFLGNIPKQYCNQILWFDSTDGTFMPSIDVTNESRNDDDDTSVCLGTRQCSWFAGCTNRTWNSSAVPLIGLPNTQDYKWVDRNSGLTWSGNDTCLYSCQNQTKGLLYQLFRNLFCSYGLTEAHGKWRCADASITNDKGHDGHRTPTWWLTGSNLTLSVNNSGLFFLCGNGVYKGFPPKWSGRCGLGYLVPSLTRYLTLNASQITNLRSFIHKVTPHRCTQGDTDNPPLYCNPKDNSTIRALFPSLGTYDLEKAILNISKAMEQEFSAT

SEQ ID NO: 16 - protein, 377 aa, Homo sapiens
LLAPVFRTLSILTNQSNCWLCEHLDNAEQPELVFVPASASTWWTYSGQWMYERVWYPQAEVQNHSTSSYRKVTWHWEASMEAQGLSFAQVRLLEGNFSLCVENKNGSGPFLGNIPKQYCNQILWFDSTDGTFMPSIDVTNESRNDDDDTSVCLGTRQCSWFAGCTNRTWNSSAVPLIGLPNTQDYKWVDRNSGLTWSGNDTCLYSCQNQTKGLLYQLFRNLFCSYGLTEAHGKWRCADASITNDKGHDGHRTPTWWLTGSNLTLSVNNSGLFFLCGNGVYKGFPPKWSGRCGLGYLVPSLTRYLTLNASQITNLRSFIHKVTPHRCTQGDTDNPPLYCNPKDNSTIRALFPSLGTYDLEKAILNISKAMEQEFSATK

SEQ ID NO: 17 - protein, 378 aa, Homo sapiens
LLAPVFRTLSILTNQSNCWLCEHLDNAEQPELVFVPASASTWWTYSGQWMYERVWYPQAEVQNHSTSSYRKVTWHWEASMEAQGLSFAQVRLLEGNFSLCVENKNGSGPFLGNIPKQYCNQILWFDSTDGTFMPSIDVTNESRNDDDDTSVCLGTRQCSWFAGCTNRTWNSSAVPLIGLPNTQDYKWVDRNSGLTWSGNDTCLYSCQNQTKGLLYQLFRNLFCSYGLTEAHGKWRCADASITNDKGHDGHRTPTWWLTGSNLTLSVNNSGLFFLCGNGVYKGFPPKWSGRCGLGYLVPSLTRYLTLNASQITNLRSFIHKVTPHRCTQGDTDNPPLYCNPKDNSTIRALFPSLGTYDLEKAILNISKAMEQEFSATKQ

SEQ ID NO: 18 - protein, 379 aa, Homo sapiens
LLAPVFRTLSILTNQSNCWLCEHLDNAEQPELVFVPASASTWWTYSGQWMYERVWYPQAEVQNHSTSSYRKVTWHWEASMEAQGLSFAQVRLLEGNFSLCVENKNGSGPFLGNIPKQYCNQILWFDSTDGTFMPSIDVTNESRNDDDDTSVCLGTRQCSWFAGCTNRTWNSSAVPLIGLPNTQDYKWVDRNSGLTWSGNDTCLYSCQNQTKGLLYQLFRNLFCSYGLTEAHGKWRCADASITNDKGHDGHRTPTWWLTGSNLTLSVNNSGLFFLCGNGVYKGFPPKWSGRCGLGYLVPSLTRYLTLNASQITNLRSFIHKVTPHRCTQGDTDNPPLYCNPKDNSTIRALFPSLGTYDLEKAILNISKAMEQEFSATKQT

SEQ ID NO: 19 - protein, 380 aa, Homo sapiens
LLAPVFRTLSILTNQSNCWLCEHLDNAEQPELVFVPASASTWWTYSGQWMYERVWYPQAEVQNHSTSSYRKVTWHWEASMEAQGLSFAQVRLLEGNFSLCVENKNGSGPFLGNIPKQYCNQILWFDSTDGTFMPSIDVTNESRNDDDDTSVCLGTRQCSWFAGCTNRTWNSSAVPLIGLPNTQDYKWVDRNSGLTWSGNDTCLYSCQNQTKGLLYQLFRNLFCSYGLTEAHGKWRCADASITNDKGHDGHRTPTWWLTGSNLTLSVNNSGLFFLCGNGVYKGFPPKWSGRCGLGYLVPSLTRYLTLNASQITNLRSFIHKVTPHRCTQGDTDNPPLYCNPKDNSTIRALFPSLGTYDLEKAILNISKAMEQEFSATKQTL

SEQ ID NO: 20 - protein, 381 aa, Homo sapiens
LLAPVFRTLSILTNQSNCWLCEHLDNAEQPELVFVPASASTWWTYSGQWMYERVWYPQAEVQNHSTSSYRKVTWHWEASMEAQGLSFAQVRLLEGNFSLCVENKNGSGPFLGNIPKQYCNQILWFDSTDGTFMPSIDVTNESRNDDDDTSVCLGTRQCSWFAGCTNRTWNSSAVPLIGLPNTQDYKWVDRNSGLTWSGNDTCLYSCQNQTKGLLYQLFRNLFCSYGLTEAHGKWRCADASITNDKGHDGHRTPTWWLTGSNLTLSVNNSGLFFLCGNGVYKGFPPKWSGRCGLGYLVPSLTRYLTLNASQITNLRSFIHKVTPHRCTQGDTDNPPLYCNPKDNSTIRALFPSLGTYDLEKAILNISKAMEQEFSATKQTLE

SEQ ID NO: 21 - protein, 382 aa, Homo sapiens
LLAPVFRTLSILTNQSNCWLCEHLDNAEQPELVFVPASASTWWTYSGQWMYERVWYPQAEVQNHSTSSYRKVTWHWEASMEAQGLSFAQVRLLEGNFSLCVENKNGSGPFLGNIPKQYCNQILWFDSTDGTFMPSIDVTNESRNDDDDTSVCLGTRQCSWFAGCTNRTWNSSAVPLIGLPNTQDYKWVDRNSGLTWSGNDTCLYSCQNQTKGLLYQLFRNLFCSYGLTEAHGKWRCADASITNDKGHDGHRTPTWWLTGSNLTLSVNNSGLFFLCGNGVYKGFPPKWSGRCGLGYLVPSLTRYLTLNASQITNLRSFIHKVTPHRCTQGDTDNPPLYCNPKDNSTIRALFPSLGTYDLEKAILNISKAMEQEFSATKQTLEA

SEQ ID NO: 22 - protein, 383 aa, Homo sapiens
LLAPVFRTLSILTNQSNCWLCEHLDNAEQPELVFVPASASTWWTYSGQWMYERVWYPQAEVQNHSTSSYRKVTWHWEASMEAQGLSFAQVRLLEGNFSLCVENKNGSGPFLGNIPKQYCNQILWFDSTDGTFMPSIDVTNESRNDDDDTSVCLGTRQCSWFAGCTNRTWNSSAVPLIGLPNTQDYKWVDRNSGLTWSGNDTCLYSCQNQTKGLLYQLFRNLFCSYGLTEAHGKWRCADASITNDKGHDGHRTPTWWLTGSNLTLSVNNSGLFFLCGNGVYKGFPPKWSGRCGLGYLVPSLTRYLTLNASQITNLRSFIHKVTPHRCTQGDTDNPPLYCNPKDNSTIRALFPSLGTYDLEKAILNISKAMEQEFSATKQTLEAH

SEQ ID NO: 23 - protein, 384 aa, Homo sapiens
LLAPVFRTLSILTNQSNCWLCEHLDNAEQPELVFVPASASTWWTYSGQWMYERVWYPQAEVQNHSTSSYRKVTWHWEASMEAQGLSFAQVRLLEGNFSLCVENKNGSGPFLGNIPKQYCNQILWFDSTDGTFMPSIDVTNESRNDDDDTSVCLGTRQCSWFAGCTNRTWNSSAVPLIGLPNTQDYKWVDRNSGLTWSGNDTCLYSCQNQTKGLLYQLFRNLFCSYGLTEAHGKWRCADASITNDKGHDGHRTPTWWLTGSNLTLSVNNSGLFFLCGNGVYKGFPPKWSGRCGLGYLVPSLTRYLTLNASQITNLRSFIHKVTPHRCTQGDTDNPPLYCNPKDNSTIRALFPSLGTYDLEKAILNISKAMEQEFSATKQTLEAHQ

SEQ ID NO: 24 - protein, 385 aa, Homo sapiens
LLAPVFRTLSILTNQSNCWLCEHLDNAEQPELVFVPASASTWWTYSGQWMYERVWYPQAEVQNHSTSSYRKVTWHWEASMEAQGLSFAQVRLLEGNFSLCVENKNGSGPFLGNIPKQYCNQILWFDSTDGTFMPSIDVTNESRNDDDDTSVCLGTRQCSWFAGCTNRTWNSSAVPLIGLPNTQDYKWVDRNSGLTWSGNDTCLYSCQNQTKGLLYQLFRNLFCSYGLTEAHGKWRCADASITNDKGHDGHRTPTWWLTGSNLTLSVNNSGLFFLCGNGVYKGFPPKWSGRCGLGYLVPSLTRYLTLNASQITNLRSFIHKVTPHRCTQGDTDNPPLYCNPKDNSTIRALFPSLGTYDLEKAILNISKAMEQEFSATKQTLEAHQS

SEQ ID NO: 25 - protein, 386 aa, Homo sapiens
LLAPVFRTLSILTNQSNCWLCEHLDNAEQPELVFVPASASTWWTYSGQWMYERVWYPQAEVQNHSTSSYRKVTWHWEASMEAQGLSFAQVRLLEGNFSLCVENKNGSGPFLGNIPKQYCNQILWFDSTDGTFMPSIDVTNESRNDDDDTSVCLGTRQCSWFAGCTNRTWNSSAVPLIGLPNTQDYKWVDRNSGLTWSGNDTCLYSCQNQTKGLLYQLFRNLFCSYGLTEAHGKWRCADASITNDKGHDGHRTPTWWLTGSNLTLSVNNSGLFFLCGNGVYKGFPPKWSGRCGLGYLVPSLTRYLTLNASQITNLRSFIHKVTPHRCTQGDTDNPPLYCNPKDNSTIRALFPSLGTYDLEKAILNISKAMEQEFSATKQTLEAHQSK

SEQ ID NO: 26 - protein, 387 aa, Homo sapiens
LLAPVFRTLSILTNQSNCWLCEHLDNAEQPELVFVPASASTWWTYSGQWMYERVWYPQAEVQNHSTSSYRKVTWHWEASMEAQGLSFAQVRLLEGNFSLCVENKNGSGPFLGNIPKQYCNQILWFDSTDGTFMPSIDVTNESRNDDDDTSVCLGTRQCSWFAGCTNRTWNSSAVPLIGLPNTQDYKWVDRNSGLTWSGNDTCLYSCQNQTKGLLYQLFRNLFCSYGLTEAHGKWRCADASITNDKGHDGHRTPTWWLTGSNLTLSVNNSGLFFLCGNGVYKGFPPKWSGRCGLGYLVPSLTRYLTLNASQITNLRSFIHKVTPHRCTQGDTDNPPLYCNPKDNSTIRALFPSLGTYDLEKAILNISKAMEQEFSATKQTLEAHQSKV

SEQ ID NO: 27 - protein, 388 aa, Homo sapiens
LLAPVFRTLSILTNQSNCWLCEHLDNAEQPELVFVPASASTWWTYSGQWMYERVWYPQAEVQNHSTSSYRKVTWHWEASMEAQGLSFAQVRLLEGNFSLCVENKNGSGPFLGNIPKQYCNQILWFDSTDGTFMPSIDVTNESRNDDDDTSVCLGTRQCSWFAGCTNRTWNSSAVPLIGLPNTQDYKWVDRNSGLTWSGNDTCLYSCQNQTKGLLYQLFRNLFCSYGLTEAHGKWRCADASITNDKGHDGHRTPTWWLTGSNLTLSVNNSGLFFLCGNGVYKGFPPKWSGRCGLGYLVPSLTRYLTLNASQITNLRSFIHKVTPHRCTQGDTDNPPLYCNPKDNSTIRALFPSLGTYDLEKAILNISKAMEQEFSATKQTLEAHQSKVS

SEQ ID NO: 28 - protein, 389 aa, Homo sapiens
LLAPVFRTLSILTNQSNCWLCEHLDNAEQPELVFVPASASTWWTYSGQWMYERVWYPQAEVQNHSTSSYRKVTWHWEASMEAQGLSFAQVRLLEGNFSLCVENKNGSGPFLGNIPKQYCNQILWFDSTDGTFMPSIDVTNESRNDDDDTSVCLGTRQCSWFAGCTNRTWNSSAVPLIGLPNTQDYKWVDRNSGLTWSGNDTCLYSCQNQTKGLLYQLFRNLFCSYGLTEAHGKWRCADASITNDKGHDGHRTPTWWLTGSNLTLSVNNSGLFFLCGNGVYKGFPPKWSGRCGLGYLVPSLTRYLTLNASQITNLRSFIHKVTPHRCTQGDTDNPPLYCNPKDNSTIRALFPSLGTYDLEKAILNISKAMEQEFSATKQTLEAHQSKVSS

SEQ ID NO: 29 - protein, 390 aa, Homo sapiens
LLAPVFRTLSILTNQSNCWLCEHLDNAEQPELVFVPASASTWWTYSGQWMYERVWYPQAEVQNHSTSSYRKVTWHWEASMEAQGLSFAQVRLLEGNFSLCVENKNGSGPFLGNIPKQYCNQILWFDSTDGTFMPSIDVTNESRNDDDDTSVCLGTRQCSWFAGCTNRTWNSSAVPLIGLPNTQDYKWVDRNSGLTWSGNDTCLYSCQNQTKGLLYQLFRNLFCSYGLTEAHGKWRCADASITNDKGHDGHRTPTWWLTGSNLTLSVNNSGLFFLCGNGVYKGFPPKWSGRCGLGYLVPSLTRYLTLNASQITNLRSFIHKVTPHRCTQGDTDNPPLYCNPKDNSTIRALFPSLGTYDLEKAILNISKAMEQEFSATKQTLEAHQSKVSSL

SEQ ID NO: 30 - protein, 391 aa, Homo sapiens
LLAPVFRTLSILTNQSNCWLCEHLDNAEQPELVFVPASASTWWTYSGQWMYERVWYPQAEVQNHSTSSYRKVTWHWEASMEAQGLSFAQVRLLEGNFSLCVENKNGSGPFLGNIPKQYCNQILWFDSTDGTFMPSIDVTNESRNDDDDTSVCLGTRQCSWFAGCTNRTWNSSAVPLIGLPNTQDYKWVDRNSGLTWSGNDTCLYSCQNQTKGLLYQLFRNLFCSYGLTEAHGKWRCADASITNDKGHDGHRTPTWWLTGSNLTLSVNNSGLFFLCGNGVYKGFPPKWSGRCGLGYLVPSLTRYLTLNASQITNLRSFIHKVTPHRCTQGDTDNPPLYCNPKDNSTIRALFPSLGTYDLEKAILNISKAMEQEFSATKQTLEAHQSKVSSLA

SEQ ID NO: 31 - protein, 392 aa, Homo sapiens
LLAPVFRTLSILTNQSNCWLCEHLDNAEQPELVFVPASASTWWTYSGQWMYERVWYPQAEVQNHSTSSYRKVTWHWEASMEAQGLSFAQVRLLEGNFSLCVENKNGSGPFLGNIPKQYCNQILWFDSTDGTFMPSIDVTNESRNDDDDTSVCLGTRQCSWFAGCTNRTWNSSAVPLIGLPNTQDYKWVDRNSGLTWSGNDTCLYSCQNQTKGLLYQLFRNLFCSYGLTEAHGKWRCADASITNDKGHDGHRTPTWWLTGSNLTLSVNNSGLFFLCGNGVYKGFPPKWSGRCGLGYLVPSLTRYLTLNASQITNLRSFIHKVTPHRCTQGDTDNPPLYCNPKDNSTIRALFPSLGTYDLEKAILNISKAMEQEFSATKQTLEAHQSKVSSLAS

SEQ ID NO: 32 - protein, 393 aa, Homo sapiens
LLAPVFRTLSILTNQSNCWLCEHLDNAEQPELVFVPASASTWWTYSGQWMYERVWYPQAEVQNHSTSSYRKVTWHWEASMEAQGLSFAQVRLLEGNFSLCVENKNGSGPFLGNIPKQYCNQILWFDSTDGTFMPSIDVTNESRNDDDDTSVCLGTRQCSWFAGCTNRTWNSSAVPLIGLPNTQDYKWVDRNSGLTWSGNDTCLYSCQNQTKGLLYQLFRNLFCSYGLTEAHGKWRCADASITNDKGHDGHRTPTWWLTGSNLTLSVNNSGLFFLCGNGVYKGFPPKWSGRCGLGYLVPSLTRYLTLNASQITNLRSFIHKVTPHRCTQGDTDNPPLYCNPKDNSTIRALFPSLGTYDLEKAILNISKAMEQEFSATKQTLEAHQSKVSSLASA

SEQ ID NO: 33 - protein, 394 aa, Homo sapiens
LLAPVFRTLSILTNQSNCWLCEHLDNAEQPELVFVPASASTWWTYSGQWMYERVWYPQAEVQNHSTSSYRKVTWHWEASMEAQGLSFAQVRLLEGNFSLCVENKNGSGPFLGNIPKQYCNQILWFDSTDGTFMPSIDVTNESRNDDDDTSVCLGTRQCSWFAGCTNRTWNSSAVPLIGLPNTQDYKWVDRNSGLTWSGNDTCLYSCQNQTKGLLYQLFRNLFCSYGLTEAHGKWRCADASITNDKGHDGHRTPTWWLTGSNLTLSVNNSGLFFLCGNGVYKGFPPKWSGRCGLGYLVPSLTRYLTLNASQITNLRSFIHKVTPHRCTQGDTDNPPLYCNPKDNSTIRALFPSLGTYDLEKAILNISKAMEQEFSATKQTLEAHQSKVSSLASAS

SEQ ID NO: 34 - protein, 89 aa, Homo sapiens
ATKQTLEAHQSKVSSLASASRKDHVLDIPTTQRQTACGTVGKQCCLYINYSEEIKSNIQRLHEASENLKNVPLLDWQGIFAKVGDWFRS

SEQ ID NO: 35 - protein, 88 aa, Homo sapiens
TKQTLEAHQSKVSSLASASRKDHVLDIPTTQRQTACGTVGKQCCLYINYSEEIKSNIQRLHEASENLKNVPLLDWQGIFAKVGDWFRS

SEQ ID NO: 36 - protein, 87 aa, Homo sapiens
KQTLEAHQSKVSSLASASRKDHVLDIPTTQRQTACGTVGKQCCLYINYSEEIKSNIQRLHEASENLKNVPLLDWQGIFAKVGDWFRS

SEQ ID NO: 37 - protein, 86 aa, Homo sapiens
QTLEAHQSKVSSLASASRKDHVLDIPTTQRQTACGTVGKQCCLYINYSEEIKSNIQRLHEASENLKNVPLLDWQGIFAKVGDWFRS

SEQ ID NO: 38 - protein, 85 aa, Homo sapiens
TLEAHQSKVSSLASASRKDHVLDIPTTQRQTACGTVGKQCCLYINYSEEIKSNIQRLHEASENLKNVPLLDWQGIFAKVGDWFRS

SEQ ID NO: 39 - protein, 84 aa, Homo sapiens
LEAHQSKVSSLASASRKDHVLDIPTTQRQTACGTVGKQCCLYINYSEEIKSNIQRLHEASENLKNVPLLDWQGIFAKVGDWFRS

SEQ ID NO: 40 - protein, 83 aa, Homo sapiens
EAHQSKVSSLASASRKDHVLDIPTTQRQTACGTVGKQCCLYINYSEEIKSNIQRLHEASENLKNVPLLDWQGIFAKVGDWFRS

SEQ ID NO: 41 - protein, 82 aa, Homo sapiens
AHQSKVSSLASASRKDHVLDIPTTQRQTACGTVGKQCCLYINYSEEIKSNIQRLHEASENLKNVPLLDWQGIFAKVGDWFRS

SEQ ID NO: 42 - protein, 81 aa, Homo sapiens
HQSKVSSLASASRKDHVLDIPTTQRQTACGTVGKQCCLYINYSEEIKSNIQRLHEASENLKNVPLLDWQGIFAKVGDWFRS

SEQ ID NO: 43 - protein, 80 aa, Homo sapiens
QSKVSSLASASRKDHVLDIPTTQRQTACGTVGKQCCLYINYSEEIKSNIQRLHEASENLKNVPLLDWQGIFAKVGDWFRS

SEQ ID NO: 44 - protein, 79 aa, Homo sapiens
SKVSSLASASRKDHVLDIPTTQRQTACGTVGKQCCLYINYSEEIKSNIQRLHEASENLKNVPLLDWQGIFAKVGDWFRS

SEQ ID NO: 45 - protein, 89 aa, Homo sapiens
KVSSLASASRKDHVLDIPTTQRQTACGTVGKQCCLYINYSEEIKSNIQRLHEASENLKNVPLLDWQGIFAKVGDWFRSWGYVLLIVLFC

SEQ ID NO: 46 - protein, 88 aa, Homo sapiens
VSSLASASRKDHVLDIPTTQRQTACGTVGKQCCLYINYSEEIKSNIQRLHEASENLKNVPLLDWQGIFAKVGDWFRSWGYVLLIVLFC

SEQ ID NO: 47 - protein, 87 aa, Homo sapiens
SSLASASRKDHVLDIPTTQRQTACGTVGKQCCLYINYSEEIKSNIQRLHEASENLKNVPLLDWQGIFAKVGDWFRSWGYVLLIVLFC

SEQ ID NO: 48 - protein, 86 aa, Homo sapiens
SLASASRKDHVLDIPTTQRQTACGTVGKQCCLYINYSEEIKSNIQRLHEASENLKNVPLLDWQGIFAKVGDWFRSWGYVLLIVLFC

SEQ ID NO: 49 - protein, 85 aa, Homo sapiens
LASASRKDHVLDIPTTQRQTACGTVGKQCCLYINYSEEIKSNIQRLHEASENLKNVPLLDWQGIFAKVGDWFRSWGYVLLIVLFC

SEQ ID NO: 50 - protein, 84 aa, Homo sapiens
ASASRKDHVLDIPTTQRQTACGTVGKQCCLYINYSEEIKSNIQRLHEASENLKNVPLLDWQGIFAKVGDWFRSWGYVLLIVLFC

SEQ ID NO: 51 - protein, 83 aa, Homo sapiens
SASRKDHVLDIPTTQRQTACGTVGKQCCLYINYSEEIKSNIQRLHEASENLKNVPLLDWQGIFAKVGDWFRSWGYVLLIVLFC

SEQ ID NO: 52 - protein, 82 aa, Homo sapiens
ASRKDHVLDIPTTQRQTACGTVGKQCCLYINYSEEIKSNIQRLHEASENLKNVPLLDWQGIFAKVGDWFRSWGYVLLIVLFC

SEQ ID NO: 53 - protein, 81 aa, Homo sapiens
SRKDHVLDIPTTQRQTACGTVGKQCCLYINYSEEIKSNIQRLHEASENLKNVPLLDWQGIFAKVGDWFRSWGYVLLIVLFC

SEQ ID NO: 54 - protein, 80 aa, Homo sapiens
RKDHVLDIPTTQRQTACGTVGKQCCLYINYSEEIKSNIQRLHEASENLKNVPLLDWQGIFAKVGDWFRSWGYVLLIVLFC

SEQ ID NO: 55 - protein, 424 aa, Homo sapiens
LLAPVFRTLSILTNQSNCWLCEHLDNAEQPELVFVPASASTWWTYSGQWMYERVWYPQAEVQNHSTSSYRKVTWHWEASMEAQGLSFAQVRLLEGNFSLCVENKNGSGPFLGNIPKQYCNQILWFDSTDGTFMPSIDVTNESRNDDDDTSVCLGTRQCSWFAGCTNRTWNSSAVPLIGLPNTQDYKWVDRNSGLTWSGNDTCLYSCQNQTKGLLYQLFRNLFCSYGLTEAHGKWRCADASITNDKGHDGHRTPTWWLTGSNLTLSVNNSGLFFLCGNGVYKGFPPKWSGRCGLGYLVPSLTRYLTLNASQITNLRSFIHKVTPHRCTQGDTDNPPLYCNPKDNSTIRALFPSLGTYDLEKAILNISKAMEQEFSATKQTLEAHQSKVSSLASASRKDHVLDIPTTQRQTACGTVGKQCCLYINY

SEQ ID NO: 56 - protein, 425 aa, Homo sapiens
LLAPVFRTLSILTNQSNCWLCEHLDNAEQPELVFVPASASTWWTYSGQWMYERVWYPQAEVQNHSTSSYRKVTWHWEASMEAQGLSFAQVRLLEGNFSLCVENKNGSGPFLGNIPKQYCNQILWFDSTDGTFMPSIDVTNESRNDDDDTSVCLGTRQCSWFAGCTNRTWNSSAVPLIGLPNTQDYKWVDRNSGLTWSGNDTCLYSCQNQTKGLLYQLFRNLFCSYGLTEAHGKWRCADASITNDKGHDGHRTPTWWLTGSNLTLSVNNSGLFFLCGNGVYKGFPPKWSGRCGLGYLVPSLTRYLTLNASQITNLRSFIHKVTPHRCTQGDTDNPPLYCNPKDNSTIRALFPSLGTYDLEKAILNISKAMEQEFSATKQTLEAHQSKVSSLASASRKDHVLDIPTTQRQTACGTVGKQCCLYINYS

SEQ ID NO: 57 - protein, 426 aa, Homo sapiens
LLAPVFRTLSILTNQSNCWLCEHLDNAEQPELVFVPASASTWWTYSGQWMYERVWYPQAEVQNHSTSSYRKVTWHWEASMEAQGLSFAQVRLLEGNFSLCVENKNGSGPFLGNIPKQYCNQILWFDSTDGTFMPSIDVTNESRNDDDDTSVCLGTRQCSWFAGCTNRTWNSSAVPLIGLPNTQDYKWVDRNSGLTWSGNDTCLYSCQNQTKGLLYQLFRNLFCSYGLTEAHGKWRCADASITNDKGHDGHRTPTWWLTGSNLTLSVNNSGLFFLCGNGVYKGFPPKWSGRCGLGYLVPSLTRYLTLNASQITNLRSFIHKVTPHRCTQGDTDNPPLYCNPKDNSTIRALFPSLGTYDLEKAILNISKAMEQEFSATKQTLEAHQSKVSSLASASRKDHVLDIPTTQRQTACGTVGKQCCLYINYSE

SEQ ID NO: 58 - protein, 427 aa, Homo sapiens
LLAPVFRTLSILTNQSNCWLCEHLDNAEQPELVFVPASASTWWTYSGQWMYERVWYPQAEVQNHSTSSYRKVTWHWEASMEAQGLSFAQVRLLEGNFSLCVENKNGSGPFLGNIPKQYCNQILWFDSTDGTFMPSIDVTNESRNDDDDTSVCLGTRQCSWFAGCTNRTWNSSAVPLIGLPNTQDYKWVDRNSGLTWSGNDTCLYSCQNQTKGLLYQLFRNLFCSYGLTEAHGKWRCADASITNDKGHDGHRTPTWWLTGSNLTLSVNNSGLFFLCGNGVYKGFPPKWSGRCGLGYLVPSLTRYLTLNASQITNLRSFIHKVTPHRCTQGDTDNPPLYCNPKDNSTIRALFPSLGTYDLEKAILNISKAMEQEFSATKQTLEAHQSKVSSLASASRKDHVLDIPTTQRQTACGTVGKQCCLYINYSEE

SEQ ID NO: 59 - protein, 428 aa, Homo sapiens
LLAPVFRTLSILTNQSNCWLCEHLDNAEQPELVFVPASASTWWTYSGQWMYERVWYPQAEVQNHSTSSYRKVTWHWEASMEAQGLSFAQVRLLEGNFSLCVENKNGSGPFLGNIPKQYCNQILWFDSTDGTFMPSIDVTNESRNDDDDTSVCLGTRQCSWFAGCTNRTWNSSAVPLIGLPNTQDYKWVDRNSGLTWSGNDTCLYSCQNQTKGLLYQLFRNLFCSYGLTEAHGKWRCADASITNDKGHDGHRTPTWWLTGSNLTLSVNNSGLFFLCGNGVYKGFPPKWSGRCGLGYLVPSLTRYLTLNASQITNLRSFIHKVTPHRCTQGDTDNPPLYCNPKDNSTIRALFPSLGTYDLEKAILNISKAMEQEFSATKQTLEAHQSKVSSLASASRKDHVLDIPTTQRQTACGTVGKQCCLYINYSEEI

SEQ ID NO: 60 - protein, 429 aa, Homo sapiens
LLAPVFRTLSILTNQSNCWLCEHLDNAEQPELVFVPASASTWWTYSGQWMYERVWYPQAEVQNHSTSSYRKVTWHWEASMEAQGLSFAQVRLLEGNFSLCVENKNGSGPFLGNIPKQYCNQILWFDSTDGTFMPSIDVTNESRNDDDDTSVCLGTRQCSWFAGCTNRTWNSSAVPLIGLPNTQDYKWVDRNSGLTWSGNDTCLYSCQNQTKGLLYQLFRNLFCSYGLTEAHGKWRCADASITNDKGHDGHRTPTWWLTGSNLTLSVNNSGLFFLCGNGVYKGFPPKWSGRCGLGYLVPSLTRYLTLNASQITNLRSFIHKVTPHRCTQGDTDNPPLYCNPKDNSTIRALFPSLGTYDLEKAILNISKAMEQEFSATKQTLEAHQSKVSSLASASRKDHVLDIPTTQRQTACGTVGKQCCLYINYSEEIK

SEQ ID NO: 61 - protein, 430 aa, Homo sapiens
LLAPVFRTLSILTNQSNCWLCEHLDNAEQPELVFVPASASTWWTYSGQWMYERVWYPQAEVQNHSTSSYRKVTWHWEASMEAQGLSFAQVRLLEGNFSLCVENKNGSGPFLGNIPKQYCNQILWFDSTDGTFMPSIDVTNESRNDDDDTSVCLGTRQCSWFAGCTNRTWNSSAVPLIGLPNTQDYKWVDRNSGLTWSGNDTCLYSCQNQTKGLLYQLFRNLFCSYGLTEAHGKWRCADASITNDKGHDGHRTPTWWLTGSNLTLSVNNSGLFFLCGNGVYKGFPPKWSGRCGLGYLVPSLTRYLTLNASQITNLRSFIHKVTPHRCTQGDTDNPPLYCNPKDNSTIRALFPSLGTYDLEKAILNISKAMEQEFSATKQTLEAHQSKVSSLASASRKDHVLDIPTTQRQTACGTVGKQCCLYINYSEEIKS

SEQ ID NO: 62 - protein, 431 aa, Homo sapiens
LLAPVFRTLSILTNQSNCWLCEHLDNAEQPELVFVPASASTWWTYSGQWMYERVWYPQAEVQNHSTSSYRKVTWHWEASMEAQGLSFAQVRLLEGNFSLCVENKNGSGPFLGNIPKQYCNQILWFDSTDGTFMPSIDVTNESRNDDDDTSVCLGTRQCSWFAGCTNRTWNSSAVPLIGLPNTQDYKWVDRNSGLTWSGNDTCLYSCQNQTKGLLYQLFRNLFCSYGLTEAHGKWRCADASITNDKGHDGHRTPTWWLTGSNLTLSVNNSGLFFLCGNGVYKGFPPKWSGRCGLGYLVPSLTRYLTLNASQITNLRSFIHKVTPHRCTQGDTDNPPLYCNPKDNSTIRALFPSLGTYDLEKAILNISKAMEQEFSATKQTLEAHQSKVSSLASASRKDHVLDIPTTQRQTACGTVGKQCCLYINYSEEIKSN

SEQ ID NO: 63 - protein, 432 aa, Homo sapiens
LLAPVFRTLSILTNQSNCWLCEHLDNAEQPELVFVPASASTWWTYSGQWMYERVWYPQAEVQNHSTSSYRKVTWHWEASMEAQGLSFAQVRLLEGNFSLCVENKNGSGPFLGNIPKQYCNQILWFDSTDGTFMPSIDVTNESRNDDDDTSVCLGTRQCSWFAGCTNRTWNSSAVPLIGLPNTQDYKWVDRNSGLTWSGNDTCLYSCQNQTKGLLYQLFRNLFCSYGLTEAHGKWRCADASITNDKGHDGHRTPTWWLTGSNLTLSVNNSGLFFLCGNGVYKGFPPKWSGRCGLGYLVPSLTRYLTLNASQITNLRSFIHKVTPHRCTQGDTDNPPLYCNPKDNSTIRALFPSLGTYDLEKAILNISKAMEQEFSATKQTLEAHQSKVSSLASASRKDHVLDIPTTQRQTACGTVGKQCCLYINYSEEIKSNI

SEQ ID NO: 64 - protein, 433 aa, Homo sapiens
LLAPVFRTLSILTNQSNCWLCEHLDNAEQPELVFVPASASTWWTYSGQWMYERVWYPQAEVQNHSTSSYRKVTWHWEASMEAQGLSFAQVRLLEGNFSLCVENKNGSGPFLGNIPKQYCNQILWFDSTDGTFMPSIDVTNESRNDDDDTSVCLGTRQCSWFAGCTNRTWNSSAVPLIGLPNTQDYKWVDRNSGLTWSGNDTCLYSCQNQTKGLLYQLFRNLFCSYGLTEAHGKWRCADASITNDKGHDGHRTPTWWLTGSNLTLSVNNSGLFFLCGNGVYKGFPPKWSGRCGLGYLVPSLTRYLTLNASQITNLRSFIHKVTPHRCTQGDTDNPPLYCNPKDNSTIRALFPSLGTYDLEKAILNISKAMEQEFSATKQTLEAHQSKVSSLASASRKDHVLDIPTTQRQTACGTVGKQCCLYINYSEEIKSNIQ

SEQ ID NO: 65 - protein, 434 aa, Homo sapiens
LLAPVFRTLSILTNQSNCWLCEHLDNAEQPELVFVPASASTWWTYSGQWMYERVWYPQAEVQNHSTSSYRKVTWHWEASMEAQGLSFAQVRLLEGNFSLCVENKNGSGPFLGNIPKQYCNQILWFDSTDGTFMPSIDVTNESRNDDDDTSVCLGTRQCSWFAGCTNRTWNSSAVPLIGLPNTQDYKWVDRNSGLTWSGNDTCLYSCQNQTKGLLYQLFRNLFCSYGLTEAHGKWRCADASITNDKGHDGHRTPTWWLTGSNLTLSVNNSGLFFLCGNGVYKGFPPKWSGRCGLGYLVPSLTRYLTLNASQITNLRSFIHKVTPHRCTQGDTDNPPLYCNPKDNSTIRALFPSLGTYDLEKAILNISKAMEQEFSATKQTLEAHQSKVSSLASASRKDHVLDIPTTQRQTACGTVGKQCCLYINYSEEIKSNIQR

SEQ ID NO: 66 - protein, 435 aa, Homo sapiens
LLAPVFRTLSILTNQSNCWLCEHLDNAEQPELVFVPASASTWWTYSGQWMYERVWYPQAEVQNHSTSSYRKVTWHWEASMEAQGLSFAQVRLLEGNFSLCVENKNGSGPFLGNIPKQYCNQILWFDSTDGTFMPSIDVTNESRNDDDDTSVCLGTRQCSWFAGCTNRTWNSSAVPLIGLPNTQDYKWVDRNSGLTWSGNDTCLYSCQNQTKGLLYQLFRNLFCSYGLTEAHGKWRCADASITNDKGHDGHRTPTWWLTGSNLTLSVNNSGLFFLCGNGVYKGFPPKWSGRCGLGYLVPSLTRYLTLNASQITNLRSFIHKVTPHRCTQGDTDNPPLYCNPKDNSTIRALFPSLGTYDLEKAILNISKAMEQEFSATKQTLEAHQSKVSSLASASRKDHVLDIPTTQRQTACGTVGKQCCLYINYSEEIKSNIQRL

SEQ ID NO: 67 - protein, 436 aa, Homo sapiens
LLAPVFRTLSILTNQSNCWLCEHLDNAEQPELVFVPASASTWWTYSGQWMYERVWYPQAEVQNHSTSSYRKVTWHWEASMEAQGLSFAQVRLLEGNFSLCVENKNGSGPFLGNIPKQYCNQILWFDSTDGTFMPSIDVTNESRNDDDDTSVCLGTRQCSWFAGCTNRTWNSSAVPLIGLPNTQDYKWVDRNSGLTWSGNDTCLYSCQNQTKGLLYQLFRNLFCSYGLTEAHGKWRCADASITNDKGHDGHRTPTWWLTGSNLTLSVNNSGLFFLCGNGVYKGFPPKWSGRCGLGYLVPSLTRYLTLNASQITNLRSFIHKVTPHRCTQGDTDNPPLYCNPKDNSTIRALFPSLGTYDLEKAILNISKAMEQEFSATKQTLEAHQSKVSSLASASRKDHVLDIPTTQRQTACGTVGKQCCLYINYSEEIKSNIQRLH

SEQ ID NO: 68 - protein, 437 aa, Homo sapiens
LLAPVFRTLSILTNQSNCWLCEHLDNAEQPELVFVPASASTWWTYSGQWMYERVWYPQAEVQNHSTSSYRKVTWHWEASMEAQGLSFAQVRLLEGNFSLCVENKNGSGPFLGNIPKQYCNQILWFDSTDGTFMPSIDVTNESRNDDDDTSVCLGTRQCSWFAGCTNRTWNSSAVPLIGLPNTQDYKWVDRNSGLTWSGNDTCLYSCQNQTKGLLYQLFRNLFCSYGLTEAHGKWRCADASITNDKGHDGHRTPTWWLTGSNLTLSVNNSGLFFLCGNGVYKGFPPKWSGRCGLGYLVPSLTRYLTLNASQITNLRSFIHKVTPHRCTQGDTDNPPLYCNPKDNSTIRALFPSLGTYDLEKAILNISKAMEQEFSATKQTLEAHQSKVSSLASASRKDHVLDIPTTQRQTACGTVGKQCCLYINYSEEIKSNIQRLHE

SEQ ID NO: 69 - protein, 438 aa, Homo sapiens
LLAPVFRTLSILTNQSNCWLCEHLDNAEQPELVFVPASASTWWTYSGQWMYERVWYPQAEVQNHSTSSYRKVTWHWEASMEAQGLSFAQVRLLEGNFSLCVENKNGSGPFLGNIPKQYCNQILWFDSTDGTFMPSIDVTNESRNDDDDTSVCLGTRQCSWFAGCTNRTWNSSAVPLIGLPNTQDYKWVDRNSGLTWSGNDTCLYSCQNQTKGLLYQLFRNLFCSYGLTEAHGKWRCADASITNDKGHDGHRTPTWWLTGSNLTLSVNNSGLFFLCGNGVYKGFPPKWSGRCGLGYLVPSLTRYLTLNASQITNLRSFIHKVTPHRCTQGDTDNPPLYCNPKDNSTIRALFPSLGTYDLEKAILNISKAMEQEFSATKQTLEAHQSKVSSLASASRKDHVLDIPTTQRQTACGTVGKQCCLYINYSEEIKSNIQRLHEA

SEQ ID NO: 70 - protein, 439 aa, Homo sapiens
LLAPVFRTLSILTNQSNCWLCEHLDNAEQPELVFVPASASTWWTYSGQWMYERVWYPQAEVQNHSTSSYRKVTWHWEASMEAQGLSFAQVRLLEGNFSLCVENKNGSGPFLGNIPKQYCNQILWFDSTDGTFMPSIDVTNESRNDDDDTSVCLGTRQCSWFAGCTNRTWNSSAVPLIGLPNTQDYKWVDRNSGLTWSGNDTCLYSCQNQTKGLLYQLFRNLFCSYGLTEAHGKWRCADASITNDKGHDGHRTPTWWLTGSNLTLSVNNSGLFFLCGNGVYKGFPPKWSGRCGLGYLVPSLTRYLTLNASQITNLRSFIHKVTPHRCTQGDTDNPPLYCNPKDNSTIRALFPSLGTYDLEKAILNISKAMEQEFSATKQTLEAHQSKVSSLASASRKDHVLDIPTTQRQTACGTVGKQCCLYINYSEEIKSNIQRLHEAS

SEQ ID NO: 71 - protein, 440 aa, Homo sapiens
LLAPVFRTLSILTNQSNCWLCEHLDNAEQPELVFVPASASTWWTYSGQWMYERVWYPQAEVQNHSTSSYRKVTWHWEASMEAQGLSFAQVRLLEGNFSLCVENKNGSGPFLGNIPKQYCNQILWFDSTDGTFMPSIDVTNESRNDDDDTSVCLGTRQCSWFAGCTNRTWNSSAVPLIGLPNTQDYKWVDRNSGLTWSGNDTCLYSCQNQTKGLLYQLFRNLFCSYGLTEAHGKWRCADASITNDKGHDGHRTPTWWLTGSNLTLSVNNSGLFFLCGNGVYKGFPPKWSGRCGLGYLVPSLTRYLTLNASQITNLRSFIHKVTPHRCTQGDTDNPPLYCNPKDNSTIRALFPSLGTYDLEKAILNISKAMEQEFSATKQTLEAHQSKVSSLASASRKDHVLDIPTTQRQTACGTVGKQCCLYINYSEEIKSNIQRLHEASE

SEQ ID NO: 72 - protein, 441 aa, Homo sapiens
LLAPVFRTLSILTNQSNCWLCEHLDNAEQPELVFVPASASTWWTYSGQWMYERVWYPQAEVQNHSTSSYRKVTWHWEASMEAQGLSFAQVRLLEGNFSLCVENKNGSGPFLGNIPKQYCNQILWFDSTDGTFMPSIDVTNESRNDDDDTSVCLGTRQCSWFAGCTNRTWNSSAVPLIGLPNTQDYKWVDRNSGLTWSGNDTCLYSCQNQTKGLLYQLFRNLFCSYGLTEAHGKWRCADASITNDKGHDGHRTPTWWLTGSNLTLSVNNSGLFFLCGNGVYKGFPPKWSGRCGLGYLVPSLTRYLTLNASQITNLRSFIHKVTPHRCTQGDTDNPPLYCNPKDNSTIRALFPSLGTYDLEKAILNISKAMEQEFSATKQTLEAHQSKVSSLASASRKDHVLDIPTTQRQTACGTVGKQCCLYINYSEEIKSNIQRLHEASEN

SEQ ID NO: 73 - protein, 442 aa, Homo sapiens
LLAPVFRTLSILTNQSNCWLCEHLDNAEQPELVFVPASASTWWTYSGQWMYERVWYPQAEVQNHSTSSYRKVTWHWEASMEAQGLSFAQVRLLEGNFSLCVENKNGSGPFLGNIPKQYCNQILWFDSTDGTFMPSIDVTNESRNDDDDTSVCLGTRQCSWFAGCTNRTWNSSAVPLIGLPNTQDYKWVDRNSGLTWSGNDTCLYSCQNQTKGLLYQLFRNLFCSYGLTEAHGKWRCADASITNDKGHDGHRTPTWWLTGSNLTLSVNNSGLFFLCGNGVYKGFPPKWSGRCGLGYLVPSLTRYLTLNASQITNLRSFIHKVTPHRCTQGDTDNPPLYCNPKDNSTIRALFPSLGTYDLEKAILNISKAMEQEFSATKQTLEAHQSKVSSLASASRKDHVLDIPTTQRQTACGTVGKQCCLYINYSEEIKSNIQRLHEASENL

SEQ ID NO: 74 - protein, 443 aa, Homo sapiens
LLAPVFRTLSILTNQSNCWLCEHLDNAEQPELVFVPASASTWWTYSGQWMYERVWYPQAEVQNHSTSSYRKVTWHWEASMEAQGLSFAQVRLLEGNFSLCVENKNGSGPFLGNIPKQYCNQILWFDSTDGTFMPSIDVTNESRNDDDDTSVCLGTRQCSWFAGCTNRTWNSSAVPLIGLPNTQDYKWVDRNSGLTWSGNDTCLYSCQNQTKGLLYQLFRNLFCSYGLTEAHGKWRCADASITNDKGHDGHRTPTWWLTGSNLTLSVNNSGLFFLCGNGVYKGFPPKWSGRCGLGYLVPSLTRYLTLNASQITNLRSFIHKVTPHRCTQGDTDNPPLYCNPKDNSTIRALFPSLGTYDLEKAILNISKAMEQEFSATKQTLEAHQSKVSSLASASRKDHVLDIPTTQRQTACGTVGKQCCLYINYSEEIKSNIQRLHEASENLK

SEQ ID NO: 75 - protein, 444 aa, Homo sapiens
LLAPVFRTLSILTNQSNCWLCEHLDNAEQPELVFVPASASTWWTYSGQWMYERVWYPQAEVQNHSTSSYRKVTWHWEASMEAQGLSFAQVRLLEGNFSLCVENKNGSGPFLGNIPKQYCNQILWFDSTDGTFMPSIDVTNESRNDDDDTSVCLGTRQCSWFAGCTNRTWNSSAVPLIGLPNTQDYKWVDRNSGLTWSGNDTCLYSCQNQTKGLLYQLFRNLFCSYGLTEAHGKWRCADASITNDKGHDGHRTPTWWLTGSNLTLSVNNSGLFFLCGNGVYKGFPPKWSGRCGLGYLVPSLTRYLTLNASQITNLRSFIHKVTPHRCTQGDTDNPPLYCNPKDNSTIRALFPSLGTYDLEKAILNISKAMEQEFSATKQTLEAHQSKVSSLASASRKDHVLDIPTTQRQTACGTVGKQCCLYINYSEEIKSNIQRLHEASENLKN

SEQ ID NO: 76 - protein, 39 aa, Homo sapiens
SEEIKSNIQRLHEASENLKNVPLLDWQGIFAKVGDWFRS

SEQ ID NO: 77 - protein, 38 aa, Homo sapiens
EEIKSNIQRLHEASENLKNVPLLDWQGIFAKVGDWFRS

SEQ ID NO: 78 - protein, 37 aa, Homo sapiens
EIKSNIQRLHEASENLKNVPLLDWQGIFAKVGDWFRS

SEQ ID NO: 79 - protein, 36 aa, Homo sapiens
IKSNIQRLHEASENLKNVPLLDWQGIFAKVGDWFRS

SEQ ID NO: 80 - protein, 35 aa, Homo sapiens
KSNIQRLHEASENLKNVPLLDWQGIFAKVGDWFRS

SEQ ID NO: 81 - protein, 34 aa, Homo sapiens
SNIQRLHEASENLKNVPLLDWQGIFAKVGDWFRS

SEQ ID NO: 82 - protein, 33 aa, Homo sapiens
NIQRLHEASENLKNVPLLDWQGIFAKVGDWFRS

SEQ ID NO: 83 - protein, 32 aa, Homo sapiens
IQRLHEASENLKNVPLLDWQGIFAKVGDWFRS

SEQ ID NO: 84 - protein, 31 aa, Homo sapiens
QRLHEASENLKNVPLLDWQGIFAKVGDWFRS

SEQ ID NO: 85 - protein, 30 aa, Homo sapiens
RLHEASENLKNVPLLDWQGIFAKVGDWFRS

SEQ ID NO: 86 - protein, 29 aa, Homo sapiens
LHEASENLKNVPLLDWQGIFAKVGDWFRS

SEQ ID NO: 87 - protein, 28 aa, Homo sapiens
HEASENLKNVPLLDWQGIFAKVGDWFRS

SEQ ID NO: 88 - protein, 27 aa, Homo sapiens
EASENLKNVPLLDWQGIFAKVGDWFRS

SEQ ID NO: 89 - protein, 26 aa, Homo sapiens
ASENLKNVPLLDWQGIFAKVGDWFRS

SEQ ID NO: 90 - protein, 25 aa, Homo sapiens
SENLKNVPLLDWQGIFAKVGDWFRS

SEQ ID NO: 91 - protein, 24 aa, Homo sapiens
ENLKNVPLLDWQGIFAKVGDWFRS

SEQ ID NO: 92 - protein, 23 aa, Homo sapiens
NLKNVPLLDWQGIFAKVGDWFRS

SEQ ID NO: 93 - protein, 22 aa, Homo sapiens
LKNVPLLDWQGIFAKVGDWFRS

SEQ ID NO: 94 - protein, 21 aa, Homo sapiens
KNVPLLDWQGIFAKVGDWFRS

SEQ ID NO: 95 - protein, 20 aa, Homo sapiens
NVPLLDWQGIFAKVGDWFRS

SEQ ID NO: 96 - protein, 19 aa, Homo sapiens
VPLLDWQGIFAKVGDWFRS

SEQ ID NO: 97 - DNA, 22 bp, Artificial Sequence
  primer
actatgggctccctttcaaact

SEQ ID NO: 98 - DNA, 22 bp, Artificial Sequence
  primer
cataggaggaagtagagtgatt

SEQ ID NO: 99 - DNA, 21 bp, Artificial Sequence
  primer
ggcgacctggaagtccaacta

SEQ ID NO: 100 - DNA, 20 bp, Artificial Sequence
  primer
ccatcagcaccacagccttc

SEQ ID NO: 101 - DNA, 18 bp, Artificial Sequence
  primer
tgcagatgctgtgtctgg

SEQ ID NO: 102 - DNA, 17 bp, Artificial Sequence
  primer
cgtactggcccaggacc

SEQ ID NO: 103 - DNA, 26 bp, Artificial Sequence
  primer
ccttgggaggtcctagtgctaagtgc

SEQ ID NO: 104 - DNA, 28 bp, Artificial Sequence
  primer
aagccacaggaagctagattgagatcat

SEQ ID NO: 105 - DNA, 22 bp, Artificial Sequence
  primer
gctgtctacttcatctgctcat

SEQ ID NO: 106 - DNA, 20 bp, Artificial Sequence
  primer
ccgcagacgtagacaacgaa

SEQ ID NO: 107 - DNA, 21 bp, Artificial Sequence
  primer
tttcaaatagggcaatgaagg

SEQ ID NO: 108 - DNA, 27 bp, Artificial Sequence
  primer
catctgtcctctggaacatcgcccaag

SEQ ID NO: 109 - DNA, 22 bp, Artificial Sequence
  primer
tcagtttccatattacccactt

SEQ ID NO: 110 - DNA, 20 bp, Artificial Sequence
  primer
caaggagtgaactgaagtgg

SEQ ID NO: 111 - DNA, 22 bp, Artificial Sequence
  primer
attcgtcagaacaacccaatag

SEQ ID NO: 112 - DNA, 22 bp, Artificial Sequence
  primer
aggtaggtagtggatataggtg

SEQ ID NO: 113 - DNA, 20 bp, Artificial Sequence
  primer
aaaccaaaaaaccaaaaaaa

SEQ ID NO: 114 - DNA, 19 bp, Artificial Sequence
  primer
gtagtggatataggtggtt

SEQ ID NO: 115 - DNA, 24 bp, Artificial Sequence
  primer
aaaccaaaaaaccaaaaaaaaaac

SEQ ID NO: 116 - DNA, 20 bp, Artificial Sequence
  primer
ttttttttttggttttttgg

SEQ ID NO: 117 - DNA, 19 bp, Artificial Sequence
  primer
atctaccctaaaaaacaaa

SEQ ID NO: 118 - DNA, 20 bp, Artificial Sequence
  primer
ttttttttttggttttttgg

SEQ ID NO: 119 - DNA, 25 bp, Artificial Sequence
  primer
aaaaaacaaaacrcaaacttattac

SEQ ID NO: 120 - DNA, 33 bp, Artificial Sequence
  primer
atacatctcgagcattgtctggagtttgcttgt

SEQ ID NO: 121 - DNA, 33 bp, Artificial Sequence
  primer
atacatacgcgtgggtaagggtttacagatcag

SEQ ID NO: 122 - DNA, 32 bp, Artificial Sequence
  primer
atacatacgcgtacaccttgggaggtcctagt

SEQ ID NO: 123 - DNA, 23 bp, Artificial Sequence
  primer
  misc_feature (1)..(3): n is a, c, g, or t
nnngtcctgccctcgtcccgaag

SEQ ID NO: 124 - DNA, 23 bp, Artificial Sequence
  primer
  misc_feature (1)..(3): n is a, c, g, or t
nnncacttcagttcccgccgcga

SEQ ID NO: 125 - DNA, 24 bp, Artificial Sequence
  primer
  misc_feature (1)..(3): n is a, c, g, or t
nnngccagtttatccctcggagtt

SEQ ID NO: 126 - DNA, 23 bp, Artificial Sequence
  primer
  misc_feature (1)..(3): n is a, c, g, or t
nnnccgcagacgtagacaacgaa

SEQ ID NO: 127 - DNA, 33 bp, Artificial Sequence
  primer
caccgcatagacgcaccaaacgagacacagaca

SEQ ID NO: 128 - DNA, 33 bp, Artificial Sequence
  primer
tgtctgtgtctcgtttggtgcgtctatgcggtg

SEQ ID NO: 129 - protein, 563 aa, Pan troglodytes
MGSLSNYALLQLTLTAFLTILVQPQHLLAPVFRTLSILTNQSNCWLCEHLDNAEQPELVFVPASASTWWTYSGQWMYERMWYPQAEVQNHSTSSYRKVTWHWEASMEAQGLSFAQVRLLEGNFSLCVENKNGSGPFLGNIPKQYCNQILWFDSTDGTFMPSIDVTNESRNDDDDTSVCLGTRQCSWFAGCTNRTWNSSAVPLIGLPNTQDYKWVDRNSGLTWSGNDTCLYSCQNQTKGLLYQLFRNLFCSYGLTEAHGKWRCADANITNDKGHDGHRAPSWWLTGSNLTLSVNNSGLFFLCGNGVYKGFPPKWSGRCGLGYLVPSLTRYLTLNASQITNLRSFIHKVTPHRCTQGDTDNPPLYCNPKDNSTIRALFPSLGTYDLEKAILNISKAMEQEFSATKQTLEAHQSKVSSLASASRKDHVLDIPTTQRQTACGTVGKQCCLYINYSEEIKSNIQRLHEASENLKNVPLLDWQGIFAKVGDWFRSWGYVLLIVLFCLFIFVLIYVRVFRKSHRSLNSQPLNLALSPQQSAQLLVSETSCQVSNRAMKGLTTHQYDTSLL

SEQ ID NO: 130 - protein, 563 aa, Gorilla
MGSLSNYALLQLTLTAFLTILVQPQHLLAPVFRTLSILTNQSNCWLCEHLDNAEQPELVFVPASASTWWTYSGQWMYERVWYPQAEVQNHSTSSYRKVTWHWEASMEAQGLSFAQVRLLEGNFSLCVENKNGSGPFLGNIPKQYCNQILWFDSTDGTFMPSIDVTNESRNDDDDTSVCLGTRQCSWFAGCTNRTWNSSAVPLIGLPNTQDYKWVDRNSGLTWSGNDTCLYSCQNQTKGLLYQLFRNLFCSYGLTEAHGKWRCADANITNDKGHDGHRTPTWWLTGSNLTLSVNNSGLFFLCGNGVYKGFPPKWSGRCGLGYLVPSLTRYLTLNASQITKLRSFIHKVTPHRCTQGDTDNPPLYCNPKDNSTIRALFPSLGTYDLEKAILNISKAMEQEFSATKQTLEAHQSKVSSLASASRKDHVLDIPTTQRQTACGTVGKQCCLYINYSEEIKSNIQRLHEASENLKNVPLLDWQGIFAKVGDWFRSWGYVLLIVLFCLFIFVLIYVHVFRKSRRSLNSQPLNLALSPQQSAQLLVSETSCQVSNRAMKGLTTHQYDTSLL

SEQ ID NO: 131 - protein, 563 aa, Pongo
MGSLSNYALLQLTFTAFLTILVQPQHLLAPVFRTLSILTNQSNCWLCEHLDNAEQPELVFVPSSASTWWTYSGQWMYERVWYPQAEVPNPSTSSYGKVTRHWEASMEAQGLSFAQVRLLEGNFSLCVENKNGTGPFLGNIPKQYCNQILWFDSTDGTFMPSIDVTNESRNDYDDTSVCLGTRQCSWFAGCTNRTWNSSAVPLIGLPNTQDYKWVDRNSGLTWSGNDTCLYSCQNQTKGLLYQLFRNLFCSYGLTEAHGKWRCADANITNDKGHDGHQTPTWWLTGSNLTLSVNNSGLFFLCGNGVYKGFPPKWSGRCGLGYLVPSLTRYLTLNASQITNLRSFIHKVTPHRCTQRDTDDPPLYCNPKDNSTIRALFPSLGTYDLEKAILNISKAMEQEFSATKQTLEAHQSKVSSLASASQKDHVLDIPTTQRQTACGTVGKQCCLYINYSEEIKSNIQRLHEASENLKNIPLLDWEGIFAKVGDWFRSWGYVLLIVLFCLFIFVLIYVRVFRKSRRSLNSQPLNPALSPQQSAQLLVSETSCQVSNRAMKGLTTHQYDTSLL

SEQ ID NO: 132 - protein, 563 aa, Hylobates
MGSLSNYALLQLTLTAFLTILVQPQHLLAPVFRTLSILTNQSNCWLCEHLDNAEQPELVFVPASASTWWTYSGQWVYERVWYPQAEVQNHSTSSYGKVTRHWEASMEAQGLSFAQVRLLEGNLSLCIENKNGTGPFLGNIPKRYCNQILWFDSTDGTFMPSTDVTNESRNDYDDTSVCLGTRQCSWLAGCTNQTWNSSAVPLIGLPNTQDYKWVDRNSGLTWSGNDTCLYSCQNQTKGLLYQLFRNLFCSYGLTEAHGKWRCADVNITNDKGYDGHQTPTWWLTGSNLTLSVNNSGLFFLCGNGVYKGFPPKWSGRCGLGYLVPSLTRYLTLNASQITNLRSFIHKVTPHRCTQRDTDNPPLYCNPKHNSTIRALFPSLGTYDLEKAILNISKAMEQEFSATKQTLEAHQSKVSSLASASRKDHVLDIPTTQRQTACRTVGKQCCLYINHSEEIMSNIQRLREASENLKNVPLLDWEGIFAKVGDWFRSWGYVLLIVLFCLFIFVLIYVRVFGKSRRSLNSQPLNPALSPQQSAQQLVSETSCQVSNRAMKGLTTHQYDTSLL

SEQ ID NO: 133 - protein, 563 aa, Macaca
MVSLSNYALLQLTLTAFLTILVQAQHLLAPVFKTLSILTNQSNCWLCEHLDNAEQPELVFVPASASTWWTHSGQWMYERVWYPQAEVQNHSTSSYGKVTQHWEASMEAQGLSIAQVRLLEGNFSLCVENKNGTGPFLGNIPKQYCNQILWFDFTDGTFMPSIDVTDESRNDYDDTSVCLGTRQCSWFAGCTNQTWNSSAVPLIGLPNTQDYKWVDRNSGLTWSGNGTCLYSCQNQTKGLLYQLFRNLFCSYGLTEAHGKWRCADANITNDKGHDGHQTPTWWLTGSNLTLSVNNSGLFFLCGNGVYKGFPPKWSGRCGLGYLVPSLTRYLTLNASQITNLRSFIHKVTPHRCTQRDTDNPPLYCNPKDNSTIRALFPSLGTYDLEKAILNISKAMEQEISATKQTLEAHQSKVSSLASASQKDHVLDIPTTQRQTACRTVGKQCCLYINNSEAIMSDIQHLYEISENLKNGPFFDWEGLFAKVGDWFRSWGYVLLIVLFCLFIFVLIYVRVFRKSRRSLNSQPLNPALSPQQSAQLLINETSCQVSNRAMKELTTHQYDTSLL

SEQ ID NO: 134 - protein, 563 aa, Papio anubis
MVSLSNYALLQLTLTAFLTILVQAQHLLAPVFQTLSILTNQSNCWLCEHLDNAEQPELVFVPASASTWWTYSGQWMYERVWYAQAEVQNHSTSSYGKVTQHWEASMEAQGLSFAQVRLLEGNFSLCVENKNGTGPFLGNIPKQYCNQILWFDFTDGTFMPSIDVTDESRNDYDDTSVCLGTRQCSWFAGCTNQTWNSSAVPLIGLPNTQDYKWVDRNSGLTWSGNGTCLYSCQNQTKGLLYQLFRNLFCSYGLTEAHGKWRCADANITNDKGHDGHQTPTWWLTGSNLTLSVNNSGLFFLCGNGVYKGFPPKWSGRCGLGYLVPSLTRYLTLNASQITNLRSFIHKVTPHRCTQRDTDNPPLYCNPKDNSTIRALFPSLGTYDLEKAILNISKAMEQEISATKQTLEAHQSKVSSLASASQKDHVLDIPTTQRQTACRTVGKQCCLYINNSEAIMSDIQHLYEISENLKNGPFFDWEGLFAKVGDWFRSWGYVLLIVLFCLFIFVLIYVRVFRKSRRSLNSQPLNPALSPQQSAQLLVNETSCQVSNRAMKELTTHQYDTSLL

SEQ ID NO: 135 - protein, 562 aa, Chlorocebus sabeus
MVSLSNYALLQLTLTAFLTILVQAQHLLAPVFQTLSILTNQSNCWLCEHLDNAEQPELIFVPASASTWWTYSGQWMYERVWYPQAEVQNHSTSSYGKVTRHWEASMEAQGLSFAQVRLLEGNFSLCVENKNGTGPFLGNIPKQYWNQILWFDFTDGTFMPSIDVTDESRNDYDTSVCLGTRQCSWFAGCTNQTWNSSAVPLIGLPNTQDYKWVDRNSGLTWSGNGTCLYSCQNQTKGLLYQLFRNLFCSYGLTEAHGKWRCADANITNDKGHDGHQTPTWWLTGSNLTLSVNNSGLFFLCGNGVYKGFPPKWSGRCGLGYLVPSLTRYLTLNASQITNLRSFIHKVTPHRCTQRDTDNPPLYCNPKDNSTIRALFPSLGTYDLEKAILNISKAMEQEISATKQTLEAHQSKVSSLASASQKDHVLDIPTTQRQTACRTVGKQCCLYINNSEAIMSDIQHLYEISENLKNGPFFDWEGLFAKVGDWFRSWGYVLLIVLFCLFIFVLIYVRVFRKSRRSLNSQPLNPALSPQQSAQLLVNETSCQVSNRAMKEPTTHQYDTSLL

SEQ ID NO: 136 - protein, 563 aa, Colobus angolensis palliatus
MVSLSDYALLQLTLTAFLTILVQAQHLLAPVFRTLSILTNQSNCWLCEHLDNAEQPELVFVPASASTWWTYSGQWMYERVWYPQAEVQNQSTSSYGKATWHWEASMEAQGLSFAQVRLLEGNFSLCVENKNGTGPFLGNIPKQYCNQILWFDFTDGTFMPSIDVTDESRNDYDDTSVCLGTRQCSWFAGCTNQTWNSSAVPLIGLPNTQDYKWVDRNSGLTWSGNGTCLYSCQNQTRGLLYQLFRNLFCSYGLTQAHGKWRCADANITNDKGHDGHQTPTWWLTGSNLTLSVNNSGLFFLCGNGVYKGFPPKWSGRCGLGYLVPSLTRYLTLNASQITNLRSFIHKVTPHRCTQRDTDNPPLYCNPKDNSTIRALFPSLGTYDLEKAILNISKAMEQEISATKQTLEAHQSKVSSLASASQKDHVLDIPTTQRQTACRTVGKQCCLYINNSEAIMSDIQHLYEISENLKNGPLFDWEGLFANVGDWFRSWGYVLLIVLFCLFIFVLIYVHVFRKSHRSLNSQPLNPALSPQQSAQLLVNETSCQVSNRAMKGLTTHQYDTSLL

SEQ ID NO: 137 - protein, 563 aa, Semnopithecus entellus
MVSLSNYALLQLTLTAFLTTLVQAQHLLAPVFRTLSILTNQSNCWLCEHLDNAEQPELVFVPASASTWWTYSGQWMYERVWYPQAEVQNHSTSSYGKATWHWEAAMEAQGLSFAQVRLLEGNFSLCVENKNGTGPFLGNIPKQYCNQILWFDFTDGTFMPSIDVTDESRNDYDDTSVCLGTRQCSWFAGCTNQTWNSSAVPLIGLPNTQDYKWVDRNSGLTWSGNGTCLYSCQNQTKGLLYQLFRNLFCSYGLTEAHGKWRCADANITNDKDHDGHQNPTWWLTGSNLTLSVNNSGLFLLCGNGVYKGFPPKWSGRCGLGYLVPSLTRYLTLNASQITNLRSFIHKVTPHRCTQRDTDNSPLYCNPKDNSTVRALFPSLGTYDLEKAILNISKAMEQEISATKQTLEAHQSKVSSLVSASQKDHVLDIPTTQRQTACRTVGKQCCLYINNSEAIMSDIQHLYEISENLKNGPLFDWEGLFAKVGDWFRSWGYVLLIVLFCLFIFVLIYVHVFRKSHRSFNSQPLNPALSPQQSAQLLVNETSCQVSNRAMKGLTTHQYDTSLL

SEQ ID NO: 138 - protein, 562 aa, Rhinopithecus roxellana
MVSLSNYALLQLTLTAFLTTLVQAQHLLAPVFRTLSILTNQSNCWLCEHLDNAEQPELVFVPASASTWWTYSGQWMYKRVWYPQAEVQNHSTSSYGKATWHWEAAMEAQGLSFAQVRLLEGNFSLCVENKNGTGPFLGNIPKQYCNQILWFDFTDGTFMPSIDVTDESRNDYDDTSVCLGTRQCSWFAGCTNQTWNSSAVPLIGLPNTQDYKWVDRNSGLTWSGNGTCLYSCQNQTKGLLYQLFRNLFCSYGLTEAHGKWRCADANITNDKGHDGHQTPTWWLTGSNLTLSVNNSGLFLLCGNGVYKGFPPKWSGRCGLGYLVPSLTRYLTLNASQITNLRSFIHKVTPHRCIQRDTDNPPLYCNPKDNSTIRALFPSLGTYLEKAILNISKAMEQEISATKQTLEAHQSKVSSLASASQKDHVLDIPTTQRQTACRTVGKQCCLYINNSEAIMSDIQHLYEISENLKNGPLFDWEGLFAKVGDWFRSWGYVLLIVLFCLFIFVLIYVHIFHKSRRSLNSQPLNPALSPQQSAQLLVNETSCQVSNRAMKGLTTHQYDTSLL

SEQ ID NO: 139 - protein, 527 aa, Marmoset
MGSLLNYGLLPLMLTALLTIQVQPQHLLAPVFQTLSILTNQSNCWLCEHLDNAEEPELVFVPASASTWWTSSGRWMYERVWHLQAEVQNHSTSSCDKVTHHWEAFMEAQGLSFAQVRLLEGNFSLCVENKNGTGPFLGNIPKQYCIQTLWFDSTDGTFTPSIDVTEESRNDYDDTSVYLRTRQCPWFVDCTNWTWNSSTIPLIGLPSTQDYQWVDRNSGLTWSGNDTCLYSCQNQTKGLLYQLFRNLFCSYGLQEAHGKWRCADANITNDKGHDGHQTPTWWLTGANLTLSLNNSGLFILCGNGVYKGFPPKWSGRCGLGYLVPSLTRHLTLNTSQITNLRSFIHKVTPRRRTKRDTDSAPLYYNPKDNSTVRALFPSLGTSDLEKAILNLSKAIEQEFGATQPTLEGHQSNVSSLTSASPNDRVLDIPTTQRQTACGTVGKQCCLYINNSEDIMANIQRIKDISKNMKNIPLFDWGDWFTSWGYVLLIVFFCLIIFVLIYVRFFHKSRRSLNSQPLYPVLSPQQSA

SEQ ID NO: 140 - protein, 527 aa, Saimiri
MGSLSNYGLLQLTLTALLTIRVQPQHLLAPVFRTLSILTNQSNCWLCEHLDNAEEPELVFVPASASTWWTYSGQWLYERVCHLQAEMQNHSTSSCDKVTQHWEAFMEAQGLSFAQIRLLEGNFSLCVENKNGTGPFLGNIPKQYCTQTLWFDSTDGTFTPSIDITKESRKDYDDTRVYLRTRQRPWFADRINWTWNSSTVPLIGLPSTQNYQWVDRNSGLTWSGNDTCLYSCQNQTKGLLYQLFRNIFCSYGLTEAHGKWRCADANITNDKGHDGHQTPTWWLTGANLTLSVNNSGLFILCGNGVYKGFPPKWSGRCGLGYLVPSLTRYLTLNASQITNLRSFIHKATPHRRTKRDTHNPPLYHNPKDNSTIRALFPSLGTSDLEKAILNLSKAIEQEFGATQPTLEAHQSKGSSLASASPNDRVLDLPTTQRQTACGTVDKQCCLYINNSEDIMSDIQRIKDIAKNMKNIPLFDWGVWFRSWGYVLLIVIFCLIIFVLIYIRFFHKSRRSLNSQTLFPVLSPQQSA

SEQ ID NO: 141 - protein, 517 aa, Ateles
MDSLSNYVLLQLTLTALLTIRVQPQHLLAPVFRTLSVLTNQSNCWLCEHLDNAEEPELVFVPASASTWWTHSGQWMYERVWHPQAEVQNHSTSSWDKVTQHWEAFMEAQGLSFAQVKLLEGNFSLCIENKNGTGPFLGNIPKQYCIQTLWFDSTDGTFTPSIDVTKESRNDYDDTSVYLRTNWTWNSSTVPLIGLPGTQDYQWVDRNSGLTWSSNDTCLYSCQNQTKGLLYQLFHNIFCSYGLTEAHGKWGCADANITNDKGHDGHQTPTWWLTGANLTLSVNNSGLFILCGNGVYKGFPPKWSGRCGLGYLVPSLTRYLTLNASQITNLRSFIHKVTLRRRTKRDTDNPPLYYNPKDNSTIKALFPSLGTSDLEKAILNLSKAIDQEFGATQPTLEAHQSKVGSLASASPHDRVLDIPTTQRQTACGTVGKQCCLYINNSEDIMSDIQRIKDISENMKNIPLFDWGDWFISWGYVLLIVFFCLIIFVLTYVRFFHKSHRSLNSQPLYPVLSPQQSA

SEQ ID NO: 142 - protein, 527 aa, Pithecia
MGSLSNYVLLQLTLTALLTIRVQPQHLLAPVFRTLSILTNQSNCWLCEHLDNAEEPELVFVPASASTWWTYSGQWIYQRVWHLQAEVQNHSTSSYDKVTQHWEAFMEAQGLSFAQVRLLEGNFSLCVENKNGTGPFLGNIPKQYCIQTLWFDSTDGTFTPSIDVTKESRNDNDDTSVYLHTRQCPWFADCTNWTWNSSTVPLIGLPSTQDYQWVDRNSGLTWSGNDTCLYSCQNQTKGLLYQLFRNIFCSYGLTEAHGKWRCADANITNDKDQNGHQTPTWWLTVANLTLSVNNSGLFILCGNGVYKGFPPKWSGRCGLGRLVPSLTRYLTLNASQITNLRSFIHKVTPHRRTKRDTDNPPLYYNPKDNSTIRALFPSLGTSDLEKAILNLSKAIEQEFSATQPNLEAHQSKVSSLASASPNDRVLDIPTTQRQTACGTVGKQCCLYINNSEDIMSDIQRIKDISENMKNVPLFDWGDWFRSWGYVFLIVFFCLIIFVLIYVRFFHKSHRSLNSQPLYPVLSPQQSA

SEQ ID NO: 143 - protein, 578 aa, Felis catus
MGSLSNCVLLQLTIIAFSTIQAQSRYPLPPLFQTLATLANLSDCWLCQHLDNAQEPELVFVPAHASTWWTHSGQWMHKREWYPQTRGHNHSTSSYGRVLWHWETSAEAQGLSLTQVRLLEGNFSVCIENKNGTGPFLGDVPKQYCNQTVWFDSTDGTFRPSIDVANESKTDYYDANVCLVTGQYSWFAGHTTGTWNSSPFPLVGLPNTQDYIWVDQNSGMTWLGNDTYLYSCQNQTKGLLYQIFRNLFCSYRLTEAHGKWRCADANITNDKGHGGHPMPAWWVTRSTLTLSVNNSGLFILCGNKVYKEFPPNWSGRCGLGYLAPSVSQYPAFNGSQITGVGSLIHKVAPHRRTQRDVIDPPPVYHNPNSLRALFSRLGTSDLEEAILNISKATEQGLAATVQTSEARQSRVSSLLSALQNHHLDLSAAQQGRTCTIVGNQCCLYVNKSKEVRFLLNSVKERIDSRRRMRELAFNWTDLVSGVRDWFSGHWGHMFGFVLLGFIIVLICVAVRRSLTSRVPAQVSSSQHYTGLLACGTSCEVSNKETRGPAPPEGHKDSFALTASEQTAAAERGLLQTSL

SEQ ID NO: 144 - protein, 492 aa, Philander opossum
MMSIFPIALTLLLGFGLARHALPQHPFITPIQRAVTAANLTDFWVCHKVGNMETEVSLIPIPAPLSHWINESIYGVYYYSSYSKYQYLWKYTGQPLSPEYGKGLKYKVHVSRTFYTYQVAGHPQYRIQHRGQYPLCIQNDNGTVYLGDVPEDRCAQTLWFDTDDGTWEVSPGSNSGRNLKCGKTSPVTFWDKEKYSNFTILPLNYTSASWKSETKNYHDDTLYVLAEGGEIVHTNFNMSNCPDESSFVNFTLIYQMFESILCGYNDTPWHHLTHSWKNFNKRCPWYFETGTLMIRGKERWSPNSTWAHYFGNRLTLSLAHTPGLYFICGDYAYKALPPAWGGTCTIAYLVPDLQIHKTLTSTPVPNLRSLINRVHKPTTNPLAEKPSGFHAFARALFPWLGILEIEKAIVNMSAAVEEGFSATLDAISNLRLEVDPLSHVVVQSRMALDMKQAQQGGVCAYINTMCCFYVDKKNQISQNVTKLKNFMSTDSE

SEQ ID NO: 145 - protein, 492 aa, Macropus eugenii
MMNILPIVITALLQLGLASQALPQHPFITSIQRAVTAANLTDCWVCYKVGNMESELSLVPVPAPLSHWINESIYGVYHSSSYSKYQYLWKYTGRPLSPEYGKGLRYKVHVSRSFHTYQVAGRPQYRIQHRGQYPLCIQNDNGTVYLGDVPEDRCAQTLWFDTDDGMWEVDPGSNSGGNLKCGKTSPMTFWGKESYSNFTILPLNYTSASWESETKNYHNDTLYVLAEGGEIVHTSFNMSNCPGEGSFVNFTLLYQMFESILCAYNDTPWHHMTRLWKNFDKRCPWYFETGTLMIHGKERWSPNSTWAQYSGNRLTLSLAHAPGLYFICGDYAYKALPPGWGGTCTIAYLVPDLQIHKTLTSTSVPNPGSFINRFHKRTTNPLAEKPSGFHAFARALFPWLGILEIEKAIVNMSAAVEEGFSATLDAISNLRLEVDPLSQVVVQSRMALDMKRAQQGGVCAFINTMCCFYVDKKNQISQNVTKWKSFMNTDPE

SEQ ID NO: 146 - protein, 492 aa, Sarcophilus harrisii
MMTILPVVIAVLLRFGLAGHALPQHPFITSIQRAVTAANLTDCWVCYKVGNMESEVSLIPIPAPISHWINESIYGVYYSSSYSKYQYLWKYTGRPLSPEYGKGLKYKVHVSRSFYTYQVAGRPQYRIQHRGQYPLCIQNDNGTVYLGDVPEERCAQTLWFDTDDGTWEVDPGSNSGRNLKCGKTSPMTFWGKESYSNFTILPLNYTSVSWESETKNYHNDTLYVLAEGGEIVQTSFNMSSCPGEGSFVNFTLLYQIFESIFCAYNDTSWHHLTRLWKNFEKRCPWYFETGTLMIHGKEQWSPNSTWAQYSGNRLTLSLAHTPGLYFICGDYAYKALPPGWGGTCTIAYLVPDLQIHKTLTSTSISNSGSFINRFHKRTTNPLAEKPSGFHAFARALFPWLGILEIEKAIVNMSAAVEEGFSATLDAISNLRLEVDPLSQVVVQSRMALDMKRAQQGGVCAFINTMCCFYVDKKNQISQNVTKLKNLMNTDPE

SEQ ID NO: 147 - protein, 26 aa, Artificial
  generic signal peptide of HEMO protein (Boreoeutheria)
  MISC_FEATURE (2)..(2): G or V or D
  MISC_FEATURE (5)..(5): S or L
  MISC_FEATURE (6)..(6): N or D
  MISC_FEATURE (8)..(8): A or G or V
  MISC_FEATURE (11)..(11): Q or P
  MISC_FEATURE (13)..(13): T or M
  MISC_FEATURE (14)..(14): F or L
  MISC_FEATURE (17)..(17): F or L
  MISC_FEATURE (20)..(20): I ot T
  MISC_FEATURE (21)..(21): L or Q or R
  MISC_FEATURE (24)..(24): P or A
MXSLXXYXLLXLXXTAXLTXXVQXQH

SEQ ID NO: 148 - protein, 17 aa, Artificial
  generic immunosuppressive domain of HEMO protein (Boreoeutheria)
  MISC_FEATURE (2)..(2): R or Q or P
  MISC_FEATURE (3)..(3): K or N
  MISC_FEATURE (5)..(5): H or R
  MISC_FEATURE (9)..(9): I or L
SXXDXVLDXPTTQRQTA

SEQ ID NO: 149 - protein, 9 aa, Artificial
  Generic C-X6-CC motif of HEMO protein (Boreoeutheria)
  MISC_FEATURE (2)..(2): G or R or T
  MISC_FEATURE (3)..(3): T or I
  MISC_FEATURE (4)..(4): V
  MISC_FEATURE (5)..(5): G or D
  MISC_FEATURE (6)..(6): K or N
  MISC_FEATURE (7)..(7): Q
CXXXXXXCC

SEQ ID NO: 150 - protein, 101 aa, Homo sapiens
GTYDLEKAILNISKAMEQEFSATKQTLEAHQSKVSSLASASRKDHVLDIPTTQRQTACGTVGKQCCLYINYSEEIKSNIQRLHEASENLKNVPLLDWQGIF

SEQ ID NO: 151 - protein, 23 aa, Artificial
  Generic transmembrane domain of HEMO protein (Boreoeutheria) (end position 512)
  MISC_FEATURE (5)..(5): L or F
  MISC_FEATURE (9)..(9): L or F
  MISC_FEATURE (13)..(13): F or I
  MISC_FEATURE (18)..(18): I or T
  MISC_FEATURE (20)..(20): V or I
  MISC_FEATURE (21)..(21): R or H
  MISC_FEATURE (22)..(22): V or I or F
WGYVXLIVXFCLXIFVLXYXXXF

SEQ ID NO: 152 - DNA, 1692 bp, Homo sapiens
atgggctccctttcaaactatgccctgcttcaactaacccttactgcttttttgacaattctagtacaacctcagcacctgcttgctccagttttccggacactatctatcttgactaatcagtctaattgctggttatgtgaacatctagataatgcagaacaacccgaactagtttttgttcctgccagtgcaagcacctggtggacctattctggacaatggatgtatgaaagggtgtggtatccacaagcagaagtacagaatcactctacttcctcctatcgtaaagtgacttggcactgggaagcctccatggaagctcaaggtctatcctttgctcaagtaaggttattggagggaaatttttctctttgcgtagaaaataaaaatggcagtggacccttcctaggtaatatacctaaacaatactgtaatcaaatactatggtttgattctacagatggcaccttcatgccctctatagatgttacaaatgaatccaggaacgatgatgatgatacaagtgtttgcctaggcactagacaatgttcctggtttgcaggttgcacaaaccggacctggaacagctcagctgttcccttgattggtctgcccaatacccaagactacaaatgggtagatcgaaattctggattgacctggtcaggtaatgacacctgtctctatagctgccaaaaccaaaccaaaggccttctgtaccagctatttcgcaacctattttgctcttatggcctgacagaggcacatgggaaatggagatgtgcagatgccagcataactaatgacaaaggtcatgatggacaccggacccccacctggtggctcacaggttccaatctgaccttgtctgtgaacaactctggcctcttttttttgtgcggcaatggggtgtacaaagggtttccacctaaatggtctgggcgatgtggacttgggtatcttgtaccttccctcaccagatacctcaccttaaatgctagccaaattacaaacctgagatccttcattcataaagtaacaccgcatagatgcacccaaggagacacagacaatccacctctgtattgcaaccccaaggacaattcaacaataagggccctttttccaagtttgggaacttatgatttagaaaaggcaattctaaacatttccaaagcaatggaacaggaattcagtgccactaagcagaccttggaagcacaccaatcaaaagttagcagtttagcctctgcatcccgaaaggatcatgtcttggatataccgaccacccaacgacaaacggcttgtggaactgttggcaaacagtgttgcctctatataaattattcggaagaaataaagtctaatatacagcgtctccacgaagcatccgagaacctgaagaatgtaccgttacttgattggcaaggcatatttgcaaaagtgggagactggttcagatcatggggctatgtgcttttaattgttcttttctgcttattcatctttgttttaatctatgttcgtgtctttcgcaaatctcgcagatcccttaactcccaacctctgaacctagccttatctccacagcaatcagcacagctccttgtcagtgaaacttcatgtcaagtttcaaatagggcaatgaagggactaacaacccatcaatatgacacaagtctactttga

SEQ ID NO: 153 - DNA, 1692 bp, Pan troglodytes
atgggctccctttcaaactatgccctgcttcaactaacccttactgcttttttgacaattctagtacaacctcagcacctgcttgctccagttttccggacactatctatcttgactaatcagtctaattgctggttatgtgaacatctagataatgcagaacaacccgaactagtttttgttcctgccagtgcaagcacctggtggacctattctggacaatggatgtatgaaaggatgtggtatccacaagcagaagtacagaatcactctacttcctcctatcgtaaagtgacttggcactgggaagcctccatggaagctcaaggtctatcctttgctcaagtaaggttattggagggaaatttttctctttgcgtagaaaataaaaatggcagtggacccttcctaggtaatatacctaaacaatactgtaatcaaatactatggtttgattctacagatggcaccttcatgccctctatagatgttacaaatgaatccaggaacgatgatgatgatacaagtgtttgcctaggcactagacaatgttcctggtttgcaggttgcacaaaccggacctggaacagctcagctgttcccttgattggtctgcccaatacccaagactacaaatgggtagatcgaaattctggattgacctggtcaggtaatgacacctgtctctatagctgccaaaaccaaaccaaaggccttctgtaccagctatttcgcaacctattttgctcttatggcctgacagaggcacatgggaaatggagatgtgcagatgccaacataactaatgacaaaggtcatgatggacaccgggcccccagctggtggctcacaggttccaatctgaccttgtctgtgaacaactctggcctcttttttttgtgcggcaatggggtgtacaaagggtttccacctaaatggtctgggcgatgtggacttgggtatcttgtaccttccctcaccagatacctcaccttaaatgctagccaaattacaaacctgagatccttcattcataaagtaacaccccatagatgcacccaaggagacacagacaatccacctctgtattgcaaccccaaggacaattcaacaataagggccctttttccaagtttgggaacttatgatttagaaaaggcaattctaaacatttccaaagcaatggaacaggaattcagtgccactaagcagaccttggaagcacaccaatcaaaagttagcagtttagcctctgcatcccgaaaggatcatgtcttggatataccgaccacccaacgacaaacggcttgtggaactgttggcaaacagtgttgcctctatataaattattcggaagaaataaagtctaatatacagcgtctccacgaagcatccgagaacctgaagaatgtaccgttacttgattggcaaggcatatttgcaaaagtgggagactggttcagatcatggggctatgtgcttttaattgttcttttctgcttattcatctttgttttaatctatgttcgtgtctttcgcaaatctcacagatcccttaactcccaacctctgaacctagccttatctccacagcaatcagcacagctccttgtcagtgaaacttcatgtcaagtttcaaatagggcaatgaagggactaacaacccatcaatatgacacaagtctactttga

SEQ ID NO: 154 - DNA, 1692 bp, Gorilla
atgggctccctttcaaactatgccctgcttcaactaacccttactgcttttttgacaattctagtacaacctcaacacctgcttgctccagttttccggacactatctatcttgactaatcagtctaattgctggttatgtgaacatctagacaatgcagaacaacccgaactagtttttgttcctgccagtgcaagcacctggtggacctattctggacaatggatgtatgaaagggtgtggtatccacaagcagaagtacagaatcactctacttcctcctatcgtaaagtgacttggcactgggaagcctccatggaagctcaaggtctatcctttgctcaagtaaggttattggagggaaatttttctctttgcgtagaaaataaaaatggcagtggacccttcctaggtaatatacctaaacaatactgtaatcaaatactatggtttgattctacagatggcaccttcatgccgtctatagatgttacaaatgaatccaggaacgatgatgatgatacaagtgtttgcctaggcactagacaatgttcctggtttgcaggttgcacaaaccggacctggaacagctcagctgttcccttgattggtctgcccaatacccaagactacaaatgggtagatcgaaattctggattgacctggtcaggtaatgacacctgtctctatagctgccaaaaccaaaccaaaggccttctgtaccagctatttcgcaacctattttgctcttatggcctgacagaggcacatgggaaatggagatgtgcagatgccaacataactaatgacaaaggtcatgatggacaccggacccccacctggtggctcacaggttccaatctgaccttgtctgtgaacaactctggcctcttttttttgtgcggcaatggggtgtacaaagggtttccacctaaatggtctgggcgatgtggacttgggtatcttgtaccttccctcaccagatacctcaccttaaatgctagccaaattacaaaactgagatccttcattcataaagtaacaccacatagatgcacccaaggagacacagacaatccacctctgtattgcaaccccaaggacaattcaacaataagggccctttttccaagtttgggaacttatgatttagaaaaggcaattctaaacatttccaaagcaatggaacaggaattcagtgccactaagcagaccttggaagcacaccaatcaaaagttagcagtttagcctctgcatcccgaaaggatcatgtcttggatataccgaccacccaacgacaaacagcttgtggaactgttggcaaacagtgttgcctctatataaattattcggaagagataaagtctaatatacagcgtctccacgaagcatccgagaacctgaagaatgtaccgttacttgattggcaaggcatatttgcaaaagtgggagactggttcagatcatggggctatgtgcttttaattgttcttttctgcttatttatctttgttttaatctatgttcatgtctttcgcaaatctcgcagatcccttaactcccaacctctgaacctagccttatctccacagcaatcagcacagctccttgtcagtgaaacttcatgtcaagtttcaaatagggcaatgaagggactaacaacccatcaatatgacacaagtctactttga

SEQ ID NO: 155 - DNA, 1692 bp, Pongo
atgggctccctttcaaactatgccctgcttcaactaacctttactgcttttttgacaattctagtacaacctcaacacctgcttgctccagttttccggacactatctatcttgactaatcagtctaattgctggttatgtgaacatctagataatgcagaacaacccgaactagtttttgttccttccagtgcaagcacctggtggacctattctggacaatggatgtatgaaagggtgtggtatccacaagcagaagtaccgaatccctctacttcctcctatggtaaagtgactcggcactgggaagcctccatggaagctcaaggtctatcctttgctcaagtaaggttattggagggaaatttttctctttgcgtagaaaataaaaatggcactggacccttcctaggtaatatacctaaacaatactgtaatcaaatactatggtttgattctacagatggcaccttcatgccctctatagatgttacaaatgaatccaggaatgattatgatgatacaagtgtttgcctaggcactagacaatgttcctggtttgcaggttgcacaaaccggacctggaacagctcagctgttcccttgattggtctgcccaatacccaagactacaaatgggtagatcgaaattctggattgacctggtcaggtaatgacacctgtctctatagctgccaaaaccaaaccaaaggccttctgtaccagctgtttcgcaacctattttgctcttatggcctgacagaggcacatgggaaatggagatgtgcagatgccaacataactaatgacaaaggtcatgatggacaccagacccccacctggtggctcacaggttccaatctgaccttgtctgtgaacaactctggcctcttttttttgtgcggcaatggggtgtacaaagggtttccacctaaatggtctgggcgatgtggacttgggtatcttgtaccttccctcaccagatacctcaccttaaatgctagccaaattacaaacctgagatccttcattcataaagtaacaccacatagatgcacccaacgagacacagacgatccacctctgtattgcaaccccaaagacaattcaacaataagggccctttttccaagtttgggaacttatgatttagaaaaggcaattctaaacatttccaaagcaatggaacaggaattcagtgccactaagcagaccttggaagcacaccaatcaaaagttagcagtttagcctctgcatcccaaaaggatcatgtcttggatataccgaccacccaacgacaaacggcttgtggaactgttggcaaacagtgttgcctctatataaattattcagaagaaataaagtctaatatacagcgtctccacgaagcatccgagaacctgaagaatataccgttacttgattgggaaggcatatttgcaaaagtgggagactggttcagatcatggggctatgtgcttttaattgttcttttctgcttattcatctttgttttaatctatgttcgtgtctttcgcaaatctcgcagatcccttaactcccaacctctgaacccagccttatctccacagcaatcagcacagctccttgtcagtgaaacttcatgtcaagtttcaaatagggcaatgaaaggactaacaacccatcaatatgacacaagtctactttga

SEQ ID NO: 156 - DNA, 1692 bp, Hylobates
atgggctccctttcaaactatgccctgcttcaactaacccttactgcttttttgacaattctagtacaacctcaacacctgcttgctccagttttccggacactatctatcttgacgaatcagtctaattgctggttatgtgaacatctagataatgcggaacaaccagaactagtttttgttcctgccagtgcaagcacctggtggacctattctggacaatgggtgtatgaaagggtgtggtatccacaagcagaagtacagaatcactctacttcctcctatggtaaagtgactcggcactgggaagcctccatggaagctcaaggtctatcctttgctcaagtaaggttattggagggaaatctttctctttgcatagaaaataaaaatggaactggacccttcctaggtaatatacctaaacgatactgtaatcaaatactatggtttgattctacagatggcaccttcatgccctctacagatgttacaaatgaatccaggaatgattatgatgatacaagtgtttgcctaggcactagacaatgttcctggcttgcaggttgcacaaaccagacctggaacagctcagctgttcccttgattggtctgcccaatacacaagactacaaatgggtagatcgaaattctggattgacctggtcaggtaatgacacctgtctctatagctgccaaaaccaaaccaaaggccttctgtaccagctatttcgcaacctattttgctcttatggcctgacagaggcacatgggaaatggagatgtgcagatgtcaacataactaatgacaaaggttatgacggacaccagacccccacctggtggctcacaggttccaatctgaccttgtctgtgaacaactctggcctcttttttttatgcggcaatggggtgtacaaagggtttccacctaaatggtctgggcgatgtggacttgggtatcttgtaccttccctcaccagatacctcaccttaaatgctagccaaattacaaacctgagatccttcattcataaagtaacaccacatagatgcacccagcgagacacagacaatccacctctgtattgcaaccccaagcacaattcaacaataagggccctttttccaagtttgggaacttatgatttagaaaaggcaattctaaacatttccaaagcaatggaacaggaattcagtgccactaagcagaccttggaagcacaccaatcaaaagttagcagtttagcctctgcatcccgaaaggatcatgtcttggatataccaaccacccaacgacaaacagcttgtagaactgttggcaaacagtgttgcctctatataaatcattcggaagaaataatgtctaatatacagcgtctccgcgaagcatccgagaacctgaagaatgtaccattactggattgggaaggcatatttgcaaaagtgggagactggttcagatcatggggctacgtgcttttaattgttcttttctgcttattcatctttgttttaatctatgttcgtgtctttggcaaatctcgcagatcccttaactcccaacctctgaacccagccttatctccacagcaatcagcacagcagcttgtcagtgaaacttcatgtcaagtttcaaatagggcaatgaagggactaacaacccatcaatatgacacaagtctactttga

SEQ ID NO: 157 - DNA, 1692 bp, Macaca
atggtctccctttcaaactatgccctgcttcaattaacccttactgcttttttgacaattctagtacaagctcaacacctgcttgcaccagttttcaaaacactatctatcttgactaatcagtctaattgctggctatgtgagcatctagataatgcagaacaacccgaactagtttttgttcctgccagtgcaagcacctggtggacccattctggacaatggatgtatgaaagggtgtggtatccacaagcagaagtacagaatcactctacttcctcctatggtaaagtgactcagcactgggaagcctccatggaagctcaaggtctatccatcgctcaagtaaggttattggagggaaacttttctctttgtgtagaaaataaaaatggcactggacccttcctaggtaatatacctaaacaatactgtaatcaaatactatggtttgattttacagatggcactttcatgccctctatagatgttacagatgaatccaggaatgattatgatgatacaagtgtttgcctaggcactagacaatgttcctggtttgcaggttgcactaaccagacctggaacagctcagctgttcccttgattggtctacccaatacccaagactacaaatgggtagatcgaaattctggattgacctggtcaggtaatggcacctgtctttatagctgccaaaaccaaaccaaaggccttctgtaccagctatttcgcaacctattttgctcttatggcctgacagaggcacatgggaaatggagatgtgcagatgccaacataactaatgacaaaggtcatgatggacaccagacccccacctggtggctcacaggttccaatctgaccttgtctgtgaacaactctggcctcttttttttatgcggcaatggggtgtacaaagggtttccacctaaatggtctggacgatgtggacttgggtatctggtaccttccctcaccagatacctcaccttaaatgctagccaaattacaaacctgagatccttcattcataaagtaacaccacatagatgcacccaacgagacacagacaatccacctctgtattgcaaccccaaggacaattcaacaataagggccctttttccaagtttgggaacttatgatttggaaaaggcaattctaaacatttccaaagcaatggaacaggaaatcagtgccactaagcagaccttggaagcacaccaatcaaaagttagcagtttagcctctgcatcccaaaaggatcatgtcttggatataccaaccactcaacgacaaacggcttgtagaactgttggcaaacagtgttgcctctatataaataattcagaagcaataatgtctgatatacaacatctatatgaaatatccgagaacctgaagaatggaccgttttttgattgggaaggcctatttgcaaaagtgggagactggttcagatcatggggctatgtgcttttaattgttcttttctgcttattcatctttgttctaatctatgttcgtgtctttcgcaaatctcgcagatcccttaactcccaacctctgaacccagccttatctccacagcaatcagcacagctccttatcaatgaaacttcatgtcaagtttcaaatagggcaatgaaggaactaacaacccatcagtatgacacaagtctactttga

SEQ ID NO: 158 - DNA, 1692 bp, Papio Anubis
atggtctccctttcaaactatgccctgcttcaattaacccttactgcttttttgacaattctagtacaagctcaacacctgcttgcaccagttttccaaacactatctatcttgactaatcagtctaattgctggctatgtgagcatctagataatgcagaacaacccgaactagtttttgttcctgccagtgcaagcacctggtggacctattctggacaatggatgtatgaaagggtgtggtatgcacaagcagaagtacagaatcactctacttcctcctatggtaaagtgactcagcactgggaagcctccatggaagctcaaggtctatccttcgctcaagtaaggttattggagggaaacttttctctttgtgtagaaaataaaaatggcactggacccttcctaggtaatatacctaaacaatactgtaatcaaatactatggtttgattttacagatggcactttcatgccctctatagatgttacagatgaatccaggaatgattatgatgatacaagtgtttgcctaggcactagacaatgttcctggtttgcaggttgcactaaccagacctggaacagctcagctgttcccttgattggtctacccaatacccaagactacaaatgggtagatcgaaattctggattgacctggtcaggtaatggcacctgtctttatagctgccaaaaccaaaccaaaggccttctgtaccagctatttcgcaacctattttgctcttatggcctgacagaggcacatgggaaatggagatgtgcagatgccaacataactaatgacaaaggtcatgatggacaccagacccccacctggtggctcacaggttccaatctgaccttgtctgtgaacaactctggcctcttttttttatgcggcaatggggtgtacaaagggtttccacctaaatggtctggacgatgtggacttgggtatctggtaccttccctcaccagatacctcaccttaaatgctagccaaattacaaacctgagatccttcattcataaagtaacaccacatagatgcacccaacgagacacagacaatccacctctgtattgcaaccccaaggacaattcaacaataagggccctttttccaagtttgggaacttatgatttggaaaaggcaattctaaacatttccaaagcaatggaacaggaaatcagtgccactaagcagaccttggaagcacaccaatcaaaagttagcagtttagcctctgcatcccaaaaggatcatgtcttggatataccaaccactcaacgacaaacggcttgtagaactgttggcaaacagtgttgcctctatataaataattcggaagcaataatgtctgatatacaacatctatatgaaatatccgagaacctgaagaatggaccgttttttgattgggaaggcctatttgcaaaagtgggagactggttccgatcatggggctatgtgcttttaattgttcttttctgcttattcatctttgttctaatctatgttcgtgtctttcgcaaatctcgcagatcccttaactcccaacctctgaacccagccttgtctccacagcaatcagcacagctccttgtcaatgaaacttcatgtcaagtttcaaatagggcaatgaaggaactaacaacccatcagtatgacacaagtctactttga

SEQ ID NO: 159 - DNA, 1689 bp, Chlorocebus sabeus
atggtctccctttcaaactatgccctgcttcaattaacccttactgcttttttgacaattctagtacaagctcaacacctgcttgcaccagttttccaaacactatctatcttgactaatcagtctaattgctggctatgtgagcatctagataatgcagaacaacccgaactaatttttgttcctgccagtgcaagcacctggtggacctattctggacaatggatgtatgaaagggtgtggtatccacaagcagaagtacagaatcactctacctcctcctatggtaaagtgactcggcactgggaagcctccatggaagctcaaggtctatccttcgctcaagtaaggttattggagggaaatttttctctttgtgtagaaaataaaaatggcactggacccttcctaggtaatatacctaaacaatactggaatcaaatactatggtttgattttacagatggcactttcatgccgtctatagatgttacagatgaatccaggaatgattatgatacaagtgtttgcctaggcactagacaatgttcctggtttgcaggttgcactaaccagacctggaacagctcagctgttcccttgattggtctacccaatacccaagactacaaatgggtagatcgaaattctggattgacctggtcaggtaatggcacctgtctttatagctgccaaaaccaaaccaaaggccttctgtaccagctatttcgcaacctattttgctcttatggcctgacagaggcacatgggaaatggagatgtgcagatgccaacataactaatgacaaaggtcatgatggacaccagacccccacctggtggctcacaggttccaatctgaccttgtctgtgaacaactctggcctcttttttttatgcggcaatggggtgtacaaagggtttccacctaaatggtctggacgatgtggacttgggtatctggtaccttccctcaccagatacctcaccttaaatgctagccaaattacaaacctgagatccttcattcataaagtaacaccacatagatgcacccaacgagacacagacaatccacctctgtattgcaaccccaaggacaattcaacaataagggccctttttccaagtttgggaacttatgatttggaaaaggcaattctaaacatttccaaagcaatggaacaggaaatcagtgccactaagcagaccttggaagcacaccaatcaaaagttagcagtttagcctctgcatcccaaaaggatcatgtcttggatataccaaccactcaacgacaaacggcttgtagaactgttggcaaacagtgttgcctctatataaataattcggaagcaataatgtctgatatacaacatctatatgaaatatccgagaacctgaagaatggaccgttttttgattgggaaggcctatttgcaaaagtgggagactggttcagatcatggggctatgtgcttttaattgttcttttctgcttattcatctttgttctaatctatgttcgtgtctttcgcaaatctcgcagatcccttaactcccaacctctgaacccagccttatctccacagcaatcagcacagctccttgtcaatgaaacttcatgtcaagtttcaaatagggcaatgaaggaaccaacaacccatcagtatgacacaagtctactttga

SEQ ID NO: 160 - DNA, 1692 bp, Colobus angolensis palliatus
atggtctccctttcagactatgccctgcttcaattaacccttactgcttttttgacaattctagtacaagctcaacacctgcttgcaccagttttccgaacactatctatcttgactaatcagtctaattgctggctatgtgagcatctagataatgcagaacaacccgaactagtttttgttcctgccagtgcaagcacctggtggacctattctggacaatggatgtatgaaagggtgtggtatccacaagcagaagtacagaatcagtctacttcctcctatggtaaagcgacttggcactgggaagcctccatggaagctcaaggtctatccttcgctcaagtaaggttattggagggaaatttttctctttgtgtagaaaataaaaatggcactggacccttcctaggtaatatacctaaacaatactgtaatcaaatattatggtttgattttacagatggcactttcatgccctctatagatgttacagatgaatccaggaatgattatgatgatacaagtgtttgcctaggcactagacaatgttcctggtttgcaggttgcacaaaccagacctggaacagctcagctgttcccttgattggtctacccaatacccaagactacaaatgggtagatcgaaattctggattgacctggtcaggtaatggcacctgtctttatagctgccaaaaccaaaccagaggccttctgtaccagctatttcgcaacctattttgctcttatggcctgacacaggcacatgggaaatggagatgtgcagatgccaacataactaatgacaaaggtcatgatggacaccagacccctacctggtggctcacaggttccaatctgaccttgtctgtgaacaactctggcctcttttttttatgcggcaatggggtgtacaaagggtttccacctaaatggtctggacgatgtggacttgggtatctggtaccttccctcaccagatacctcaccttaaatgctagccaaattacaaacctgagatccttcattcataaagtaacaccacatagatgcacccaacgagacacagacaatccacctctgtattgcaaccccaaggacaattcaacaataagggccctttttccaagtttgggaacttacgatttagaaaaggcaattctaaacatttccaaagcaatggaacaggaaatcagtgccactaagcagaccttggaagcacaccaatcaaaagttagcagtttagcgtcagcctcccaaaaggatcatgtcttggatataccaaccacccaacgacaaacggcttgtagaactgttggcaaacagtgttgcctctatataaataattcggaagcaataatgtctgatatacaacatctatatgaaatatctgagaacctgaagaatggaccgttatttgattgggaaggcctatttgcaaacgtgggagactggttcagatcatggggctatgtgcttttaattgttcttttctgcttattcatctttgttctaatctatgttcacgtctttcgcaaatctcacagatcccttaactcccaacctctgaacccagccttatctccacagcaatcagcacagctccttgtcaatgaaacttcatgtcaagtttcaaatagggcaatgaagggactaacaacccatcagtatgacacaagtctactttga

SEQ ID NO: 161 - DNA, 1692 bp, Semnopithecus entellus
atggtctccctttcaaactatgccctgcttcaattaacccttactgcttttttgacaactctagtacaagctcaacacctgcttgcaccagttttccgaacactatctatcttgactaatcagtctaattgctggctatgtgagcatctagataatgcagaacaacccgaactagtttttgttcctgccagtgcaagcacctggtggacctattctggacaatggatgtatgaaagggtgtggtatccacaagcagaagtacagaatcactctacttcctcctatggtaaagcgacttggcactgggaagccgccatggaagctcaaggtctatccttcgctcaagtaaggttattggagggaaatttttctctttgtgtagaaaataaaaatggcactggacccttcctaggtaatatacctaaacaatactgtaatcaaatattatggtttgattttacagatggcaccttcatgccttctatagatgttacagatgaatccaggaatgattatgatgatacaagtgtttgcctaggcactagacaatgttcctggtttgcaggttgcacaaaccagacctggaacagttcagctgttcccttgattggtctacccaatacccaagactacaaatgggtagatcgaaattctggattgacctggtcaggtaatggcacctgtctttatagctgccaaaaccaaaccaaaggcctcctgtaccagctatttcgcaacctattttgctcttatggcctgacagaggcacatgggaaatggagatgtgcagatgccaacataactaatgacaaagatcatgatggacaccagaaccccacctggtggctcacaggttccaatctgaccttgtctgtgaacaactctggcctctttttgttatgcggcaatggggtgtacaaagggtttccacctaaatggtctggacgatgtggacttgggtatctggtaccttccctcaccagatacctcaccttaaatgctagccaaattacaaacctgagatccttcattcataaagtaacaccacatagatgcacccaacgagacacagacaattcacctctgtattgcaaccccaaggacaattcaacagtaagggccctttttccaagtttgggaacttatgatttagaaaaggcaattctaaacatttccaaagcaatggaacaggaaatcagtgccactaagcagaccttggaagcacaccaatcaaaagttagcagtttagtgtctgcctcccaaaaggatcatgtcttggatataccaaccacccaacgacaaacggcttgtagaactgttggcaaacagtgttgcctctatataaataattcggaagcaataatgtctgatatacaacatctatatgaaatatctgagaacctgaagaatggaccgttatttgattgggaaggcctatttgcaaaagtgggagactggttcagatcatggggctatgtgcttttaattgttcttttctgcttattcatctttgttctaatctatgttcacgtctttcgcaaatctcacagatcctttaactcccaacctctgaacccagccttatctccacagcaatcagcacagctccttgtcaatgaaacttcatgtcaagtttcaaatagggcaatgaagggactaacaacccatcagtatgacacaagtctactttga

SEQ ID NO: 162 - DNA, 1689 bp, Rhinopithecus roxellana
atggtctccctttcaaactatgccctgcttcaattaacccttactgcttttttgacaactctagtacaagctcaacacctgcttgcaccagttttccgaacactatctatcttgactaatcagtctaattgctggctatgtgagcatctagataatgcagaacaacccgaactagtttttgttcctgccagtgcaagcacctggtggacctattctggacaatggatgtataaaagggtgtggtatccacaagcagaagtacagaatcactctacttcctcctatggtaaagcgacttggcactgggaagccgccatggaagctcaaggtctatccttcgctcaagtaaggttattggagggaaatttttctctttgtgtagaaaataaaaatggcactggacccttcctaggtaatatacctaaacaatactgtaatcaaatattatggtttgattttacagatggcaccttcatgccttctatagatgttacagatgaatccaggaatgattatgatgatacaagtgtttgcctaggcactagacaatgttcctggtttgcaggttgcacaaaccagacctggaacagctcagctgttcccttgattggtctacccaatacccaagactacaaatgggtagatcgaaattctggattgacctggtcaggtaatggcacctgtctttatagctgccaaaaccaaaccaaaggccttctgtaccagctatttcgcaacctattttgctcttatggcctgacagaggcacatgggaaatggagatgtgcagatgccaacataactaatgacaaaggtcatgatggacaccagacccccacctggtggctcacaggttccaatctgaccttgtctgtgaacaactctggcctctttttgttatgcggcaatggggtgtacaaagggtttccacctaaatggtctggacgatgtggacttgggtatctggtaccttccctcaccagatacctcaccttaaatgctagccaaattacaaacctgagatccttcattcataaagtaacaccacatagatgcatccaacgagacacagacaatccacctctgtattgcaaccccaaggacaattcaacaataagggccctttttccaagtttgggaacttatttagaaaaggcaattctaaacatttccaaagcaatggaacaggaaatcagtgccactaagcagaccttggaagcacaccaatcaaaagttagcagtttagcgtctgcctcccaaaaggatcatgtcttggatataccaaccacccaacgacaaacggcttgtagaactgttggcaaacagtgttgcctctatataaataattcggaagcaataatgtctgatatacaacatctatatgaaatatctgagaacctgaagaatggaccattatttgattgggaaggcctatttgcaaaagtgggagactggttcagatcatggggctatgtgcttttaattgttcttttctgcttattcatctttgttctaatctatgttcacatctttcacaaatctcgcagatcccttaactcccaacctctgaacccagccttatctccacagcaatcagcacagctccttgtcaatgaaacttcatgtcaagtttcaaatagggcaatgaagggactaacaacccatcagtatgacacaagtctactttga

SEQ ID NO: 163 - DNA, 1584 bp, Marmoset
atgggttcccttttgaactacggtctgcttccgctaatgcttactgctcttttgacaattcaagtgcaacctcaacacctgcttgcaccagttttccaaacactgtctatcttgactaatcagtctaattgctggttatgtgaacatctagataatgcagaagaacccgaactagtttttgttcctgccagtgcaagcacctggtggacctcttctgggcgatggatgtacgaaagggtatggcatctacaagcggaagtgcagaatcactctacttcctcctgtgataaagtgactcatcactgggaagccttcatggaggctcaaggtctatcctttgctcaagtaaggttattggagggaaatttttctctttgtgtagaaaataaaaatggcactggacccttcctaggtaacatacctaaacaatattgtattcaaacactgtggttcgattctacagatggcaccttcacaccctctatagatgttacagaggaatccaggaatgattatgatgacacaagtgtttacctacgcactagacaatgtccttggtttgtagattgcactaactggacctggaacagctcaacgattcccttgattggtctgcccagtacccaagactaccaatgggtagatcgaaattctggattgacctggtcaggtaatgacacctgcctatatagctgccaaaaccaaaccaaaggccttctgtaccagctatttcgcaacttattttgctcttatgggctacaagaggctcatgggaaatggagatgtgcagatgccaacataactaatgacaaaggtcatgatggacaccagacccccacctggtggctcacaggcgccaatctgaccttgtctctgaataactctggtctctttattttatgtggcaatggggtatacaaagggtttccaccgaaatggtcagggcgatgtggacttgggtatctggtaccttccctcaccagacatctcaccttaaatactagccaaattacaaacctgagatccttcattcataaagtaacaccacgtagacgcaccaaacgagacacagacagtgcacctctatattacaaccccaaggacaattcaacagtaagggccctttttccaagtttgggaacttctgatttagaaaaggcaattttaaacctttccaaagcaatagaacaggaattcggtgccactcagccaaccttggaaggacaccaatcaaacgttagcagtttaacctctgcatccccaaatgatcgtgtcttggatataccgaccacccaacggcaaacggcttgtggaactgttggcaaacagtgttgcctctatataaataattcggaagatataatggctaatatacagcgtatcaaagacatatccaagaacatgaagaatataccgttatttgattggggagactggttcacatcatggggctatgtgcttttaattgtttttttctgtttaatcatctttgttctaatctatgttcgtttctttcacaaatctcgcagatcccttaactcccaacctctgtacccagtcttatctccacagcaatcagcatag

SEQ ID NO: 164 - DNA, 1584 bp, Saimiri
atgggttccctttcgaactatggtctgcttcagctaacgcttactgctcttttgacaattcgagtgcaacctcaacacctgcttgcaccagttttccgaacactgtctatcttgactaatcagtctaattgctggttatgtgaacatctcgataatgcagaagaacccgaactagtttttgttcctgccagtgcaagcacctggtggacctattctggacaatggttgtacgaaagggtatgtcatctacaagcagaaatgcagaatcactccacttcctcctgtgataaagtgactcagcactgggaagccttcatggaagctcaaggtctatcctttgctcaaataaggttattggagggaaatttttctctttgtgtagaaaataaaaatggcactggacccttcctaggtaacatacctaaacaatattgtactcaaacactgtggtttgattctacagatggcaccttcacaccctctatagatattacaaaggaatccaggaaagattatgatgatacaagggtttacctacgcactagacaacgtccctggtttgcagatcgcataaactggacctggaacagctcaacagttcccttgattggtctacccagtacccaaaactaccaatgggtagatcgaaattctggattgacctggtcaggtaatgacacctgcctatatagttgccaaaaccaaaccaaaggccttctgtaccagctgtttcgcaacatattttgctcttatgggctgacagaggctcatgggaaatggagatgtgcagatgccaacataactaatgacaaaggtcatgatggacaccagacccccacctggtggctcacaggtgccaatctgaccttgtctgtgaataactctggtctctttattttatgtggcaatggggtatacaaagggtttccaccaaaatggtcagggcgatgtggacttgggtatctggtaccttctctcaccagataccttaccttaaatgctagccaaattacaaacctgaggtccttcattcataaagcaacaccacatagacgcaccaaacgagacacacacaatccacctctatatcacaaccccaaggacaattcaacaataagggccctttttccaagtttgggaacatccgatttagaaaaggcaattttaaacctttccaaagcaatagaacaggaattcggtgccacgcagccaaccttggaagcacaccaatcaaaaggtagcagtttagcctcagcatccccaaatgatcgtgtcttggatctaccgaccacccaacggcaaacggcttgtggaactgttgacaaacaatgttgcctctatataaacaattcggaagatataatgtctgatatacagcgtatcaaagacatagccaagaacatgaagaatataccgttatttgattggggagtctggttcagatcatggggctatgtgcttttaattgttattttctgcttaatcatctttgttctaatctacattcgtttctttcacaaatctcgcagatcccttaactcccaaactctgttcccagtcttatctccacagcaatcagcatag

SEQ ID NO: 165 - DNA, 1554 bp, Ateles
atggattccctttcaaactatgttctgcttcaactaacgcttactgctcttttgacaattcgagtgcaacctcaacacctgcttgcaccagttttccgaacactgtctgtcttgactaatcagtctaattgctggttatgtgaacatctagataatgcagaagaacccgaactagtttttgttcctgccagtgcaagcacctggtggacccattctggacaatggatgtatgaaagggtatggcatccacaagcagaagtgcagaatcactctacttcctcctgggataaagtgactcagcactgggaagccttcatggaagctcaaggtctatcctttgctcaagtaaagttattggagggaaatttttctctttgtatagaaaataaaaatggcactggacccttcctaggtaacatacctaaacaatattgtattcaaacactatggtttgattctacagatggcaccttcacaccctctatagatgttacaaaggaatccagaaatgattatgatgatacaagtgtttacctacgcacaaactggacctggaacagctcaacggttcccttgattggtctgcccggtacccaagactaccagtgggtagatcgaaattctggattgacctggtcaagtaatgacacctgcctatatagctgccaaaaccaaaccaaaggccttctgtaccagctatttcacaacatattttgctcttatgggctgacagaggctcatgggaaatggggatgtgcagatgccaacataactaatgacaaaggtcatgatggacaccagacccccacctggtggctcacaggtgccaatctgaccttgtctgtgaacaactctggtctctttattttatgtggcaatggggtatacaaagggtttccaccgaaatggtcagggcgatgtggacttgggtatctggtaccttccctcaccagatacctcaccttaaatgctagccaaattacaaacctgagatccttcattcataaagtaacactacgtagacgcaccaaacgagacacagacaatccacctctgtattacaaccccaaggacaattcaacaataaaggccctttttccaagtttgggaacttctgatttagaaaaggcaattttaaacctttccaaagcgatagaccaggaattcggtgccactcagccgaccttggaagcacaccaatcaaaagttggcagtttagcctctgcatccccacatgatcgtgtcttggatataccgaccacccaacggcaaacggcttgtggaactgttggcaaacagtgttgcctctatataaataattcggaagatataatgtctgatatacagcgcatcaaagacatatccgagaacatgaagaatataccgttatttgattggggagactggttcatatcatggggctatgtacttttaattgtttttttctgcttaatcatctttgttctgacctatgttcgtttctttcacaaatctcacagatcccttaactcccaacctctgtacccagtcttatctccacagcaatcagcatag

SEQ ID NO: 166 - DNA, 1584 bp, Pithecia
atgggttccctttcgaactatgttctgcttcaactaacccttactgctcttttgacaattcgagtgcaacctcaacacctgctagcaccagttttccgaacactgtctatcttgactaatcagtctaattgctggttatgtgaacatctagataatgcagaagaacctgaactagtttttgttcctgccagtgcaagcacctggtggacctattctggtcaatggatataccaaagggtatggcatctacaagcggaagtgcagaatcactctacttcctcctatgataaagtgactcagcactgggaagccttcatggaagctcaaggtctatcctttgctcaagtaaggttattggagggaaatttttctctttgtgtagaaaataaaaatggcactggacccttcctaggtaacatacctaaacaatattgtattcaaacattatggtttgattctacagatggcaccttcacaccctctatagatgttacaaaggaatccaggaatgataatgatgatacaagtgtttacctacacactagacaatgtccttggtttgcagattgcacaaactggacctggaacagctcaacggttcccttgattggtcttcctagtacccaagactaccaatgggtagatcgaaattctggattgacctggtcaggtaatgacacttgcctatatagctgccaaaaccaaaccaaaggccttctgtaccagctatttcgcaacatattttgctcttatgggctaacagaggcgcatgggaaatggagatgtgcagatgccaacataactaatgacaaagatcaaaatggacaccagacccccacctggtggctcacagttgccaatctgaccttgtcggtgaacaactctggtctctttattttatgtggcaacggggtatacaaagggtttccaccgaaatggtcagggcgatgtggacttgggcgtctggtaccttccctcaccagatacctcaccttaaatgctagccaaattacaaacctgagatccttcattcataaagtaacaccacatagacgcaccaaacgagacacagacaatccacctctgtattacaaccccaaggacaattcaacaataagggccctttttccaagtttgggaacttctgatttagaaaaggcaattttaaacctttccaaagcaatagaacaggaattcagtgccactcagccgaacttggaagcacaccaatcaaaagttagcagtttagcctctgcatccccaaatgatcgtgtcttggatataccgaccacccaacggcaaacggcttgtggaactgttggcaaacagtgttgcctctatataaataattcggaagatataatgtctgatatacagcgtatcaaagacatatctgagaacatgaagaatgtaccgttatttgattggggagactggttcagatcatggggctatgtgtttttaattgtttttttctgcttaatcatctttgttctaatctatgttcgtttctttcacaaatctcacagatcccttaactcccaacctctgtacccagtcttatctccacagcaatcagcatag

SEQ ID NO: 167 - DNA, 1737 bp, Felis catus
atgggctccctttcaaactgtgtcttgcttcagctaaccattattgctttttcaacaattcaagcacaatcccggtacccactcccacccctcttccaaaccctggccaccttagctaatttatctgactgctggttatgtcaacacctagataacgcacaagaacctgaattagtttttgttcctgcccatgcaagcacctggtggacccattctggacagtggatgcataaaagggaatggtatccacaaacaagaggacacaatcactctacttcctcctatggtagagtactttggcattgggaaacttctgcagaagctcaaggtctgtcattaactcaggtgagacttttggagggaaatttttctgtttgcattgaaaacaaaaatggcactggacccttcctaggtgacgtaccaaaacaatactgtaatcaaacagtatggtttgattccacagatggcaccttcagaccttctatagatgttgcaaatgagtccaagacggattattatgatgcaaatgtttgcctagtcactggacaatattcctggtttgcaggccacacgactgggacctggaacagctcaccttttcccctggtcggtctgcccaatacccaagactacatatgggtggaccaaaattctggaatgacctggttaggtaatgacacctatctctatagctgccagaatcaaaccaaaggtcttctataccagatatttcgcaacttgttttgttcttataggctgacagaggcacatggtaaatggagatgtgcagatgccaacataactaatgacaaaggtcatggtggacacccgatgccagcctggtgggtcacacgttccactctgaccttgtccgtgaacaactctggtctttttatcttatgtggtaataaagtatataaggagttcccacctaactggtcagggcgatgtggactcggctacctagcaccttccgtcagccagtatcccgctttcaatggtagccaaattacaggtgtgggctccttaatacataaagtagcaccacacagacgtacgcaacgagacgtcatagaccctccacccgtttatcacaaccccaattcgttaagggctcttttttcaagattgggaacttctgatctagaagaagcaattctaaacatttccaaagccaccgaacaaggattggctgccacggtgcagacctcggaggcgcgccagtcaagagttagcagcttactctctgcactccaaaatcaccatctggatctatcggctgctcaacaaggaagaacgtgtacgatcgttggcaaccagtgctgcctctatgtaaacaagtcaaaagaagtgaggtttcttttgaacagtgtgaaggaacggattgacagtcgacgtcgaatgagggaattagcctttaattggactgacctcgtctcaggagtgagagactggttcagtggacattggggccacatgtttggatttgttctgctcggcttcatcattgttctcatctgtgttgccgttcgcagatctctcacctcccgagttcctgcccaagtgtcctcttcacagcactacacggggctccttgcctgtggaacttcatgtgaggtttcaaacaaggaaaccaggggaccagccccaccagaagggcataaagactcctttgcactgacagcatctgaacaaacagcagctgcagaaagaggcctacttcagacttctctttga

SEQ ID NO: 168 - protein, 24 aa, Homo sapiens
MGSLSNYALLQLTLTAFLTILVQP

SEQ ID NO: 169 - protein, 25 aa, Homo sapiens
MGSLSNYALLQLTLTAFLTILVQPQ

SEQ ID NO: 170 - protein, 539 aa, Homo sapiens
QHLLAPVFRTLSILTNQSNCWLCEHLDNAEQPELVFVPASASTWWTYSGQWMYERVWYPQAEVQNHSTSSYRKVTWHWEASMEAQGLSFAQVRLLEGNFSLCVENKNGSGPFLGNIPKQYCNQILWFDSTDGTFMPSIDVTNESRNDDDDTSVCLGTRQCSWFAGCTNRTWNSSAVPLIGLPNTQDYKWVDRNSGLTWSGNDTCLYSCQNQTKGLLYQLFRNLFCSYGLTEAHGKWRCADASITNDKGHDGHRTPTWWLTGSNLTLSVNNSGLFFLCGNGVYKGFPPKWSGRCGLGYLVPSLTRYLTLNASQITNLRSFIHKVTPHRCTQGDTDNPPLYCNPKDNSTIRALFPSLGTYDLEKAILNISKAMEQEFSATKQTLEAHQSKVSSLASASRKDHVLDIPTTQRQTACGTVGKQCCLYINYSEEIKSNIQRLHEASENLKNVPLLDWQGIFAKVGDWFRSWGYVLLIVLFCLFIFVLIYVRVFRKSRRSLNSQPLNLALSPQQSAQLLVSETSCQVSNRAMKGLTTHQYDTSLL

SEQ ID NO: 171 - protein, 538 aa, Homo sapiens
HLLAPVFRTLSILTNQSNCWLCEHLDNAEQPELVFVPASASTWWTYSGQWMYERVWYPQAEVQNHSTSSYRKVTWHWEASMEAQGLSFAQVRLLEGNFSLCVENKNGSGPFLGNIPKQYCNQILWFDSTDGTFMPSIDVTNESRNDDDDTSVCLGTRQCSWFAGCTNRTWNSSAVPLIGLPNTQDYKWVDRNSGLTWSGNDTCLYSCQNQTKGLLYQLFRNLFCSYGLTEAHGKWRCADASITNDKGHDGHRTPTWWLTGSNLTLSVNNSGLFFLCGNGVYKGFPPKWSGRCGLGYLVPSLTRYLTLNASQITNLRSFIHKVTPHRCTQGDTDNPPLYCNPKDNSTIRALFPSLGTYDLEKAILNISKAMEQEFSATKQTLEAHQSKVSSLASASRKDHVLDIPTTQRQTACGTVGKQCCLYINYSEEIKSNIQRLHEASENLKNVPLLDWQGIFAKVGDWFRSWGYVLLIVLFCLFIFVLIYVRVFRKSRRSLNSQPLNLALSPQQSAQLLVSETSCQVSNRAMKGLTTHQYDTSLL

SEQ ID NO: 172 - protein, 465 aa, Homo sapiens
QHLLAPVFRTLSILTNQSNCWLCEHLDNAEQPELVFVPASASTWWTYSGQWMYERVWYPQAEVQNHSTSSYRKVTWHWEASMEAQGLSFAQVRLLEGNFSLCVENKNGSGPFLGNIPKQYCNQILWFDSTDGTFMPSIDVTNESRNDDDDTSVCLGTRQCSWFAGCTNRTWNSSAVPLIGLPNTQDYKWVDRNSGLTWSGNDTCLYSCQNQTKGLLYQLFRNLFCSYGLTEAHGKWRCADASITNDKGHDGHRTPTWWLTGSNLTLSVNNSGLFFLCGNGVYKGFPPKWSGRCGLGYLVPSLTRYLTLNASQITNLRSFIHKVTPHRCTQGDTDNPPLYCNPKDNSTIRALFPSLGTYDLEKAILNISKAMEQEFSATKQTLEAHQSKVSSLASASRKDHVLDIPTTQRQTACGTVGKQCCLYINYSEEIKSNIQRLHEASENLKNVPLLDWQGIFAKVGDWFRS

SEQ ID NO: 173 - protein, 464 aa, Homo sapiens
HLLAPVFRTLSILTNQSNCWLCEHLDNAEQPELVFVPASASTWWTYSGQWMYERVWYPQAEVQNHSTSSYRKVTWHWEASMEAQGLSFAQVRLLEGNFSLCVENKNGSGPFLGNIPKQYCNQILWFDSTDGTFMPSIDVTNESRNDDDDTSVCLGTRQCSWFAGCTNRTWNSSAVPLIGLPNTQDYKWVDRNSGLTWSGNDTCLYSCQNQTKGLLYQLFRNLFCSYGLTEAHGKWRCADASITNDKGHDGHRTPTWWLTGSNLTLSVNNSGLFFLCGNGVYKGFPPKWSGRCGLGYLVPSLTRYLTLNASQITNLRSFIHKVTPHRCTQGDTDNPPLYCNPKDNSTIRALFPSLGTYDLEKAILNISKAMEQEFSATKQTLEAHQSKVSSLASASRKDHVLDIPTTQRQTACGTVGKQCCLYINYSEEIKSNIQRLHEASENLKNVPLLDWQGIFAKVGDWFRS

SEQ ID NO: 174 - protein, 462 aa, Homo sapiens
LLAPVFRTLSILTNQSNCWLCEHLDNAEQPELVFVPASASTWWTYSGQWMYERVWYPQAEVQNHSTSSYRKVTWHWEASMEAQGLSFAQVRLLEGNFSLCVENKNGSGPFLGNIPKQYCNQILWFDSTDGTFMPSIDVTNESRNDDDDTSVCLGTRQCSWFAGCTNRTWNSSAVPLIGLPNTQDYKWVDRNSGLTWSGNDTCLYSCQNQTKGLLYQLFRNLFCSYGLTEAHGKWRCADASITNDKGHDGHRTPTWWLTGSNLTLSVNNSGLFFLCGNGVYKGFPPKWSGRCGLGYLVPSLTRYLTLNASQITNLRSFIHKVTPHRCTQGDTDNPPLYCNPKDNSTIRALFPSLGTYDLEKAILNISKAMEQEFSATKQTLEAHQSKVSSLASASRKDHVLDIPTTQRQTACGTVGKQCCLYINYSEEIKSNIQRLHEASENLKNVPLLDWQGIFAKVGDWFR

SEQ ID NO: 175 - protein, 464 aa, Homo sapiens
QHLLAPVFRTLSILTNQSNCWLCEHLDNAEQPELVFVPASASTWWTYSGQWMYERVWYPQAEVQNHSTSSYRKVTWHWEASMEAQGLSFAQVRLLEGNFSLCVENKNGSGPFLGNIPKQYCNQILWFDSTDGTFMPSIDVTNESRNDDDDTSVCLGTRQCSWFAGCTNRTWNSSAVPLIGLPNTQDYKWVDRNSGLTWSGNDTCLYSCQNQTKGLLYQLFRNLFCSYGLTEAHGKWRCADASITNDKGHDGHRTPTWWLTGSNLTLSVNNSGLFFLCGNGVYKGFPPKWSGRCGLGYLVPSLTRYLTLNASQITNLRSFIHKVTPHRCTQGDTDNPPLYCNPKDNSTIRALFPSLGTYDLEKAILNISKAMEQEFSATKQTLEAHQSKVSSLASASRKDHVLDIPTTQRQTACGTVGKQCCLYINYSEEIKSNIQRLHEASENLKNVPLLDWQGIFAKVGDWFR

SEQ ID NO: 176 - protein, 463 aa, Homo sapiens
HLLAPVFRTLSILTNQSNCWLCEHLDNAEQPELVFVPASASTWWTYSGQWMYERVWYPQAEVQNHSTSSYRKVTWHWEASMEAQGLSFAQVRLLEGNFSLCVENKNGSGPFLGNIPKQYCNQILWFDSTDGTFMPSIDVTNESRNDDDDTSVCLGTRQCSWFAGCTNRTWNSSAVPLIGLPNTQDYKWVDRNSGLTWSGNDTCLYSCQNQTKGLLYQLFRNLFCSYGLTEAHGKWRCADASITNDKGHDGHRTPTWWLTGSNLTLSVNNSGLFFLCGNGVYKGFPPKWSGRCGLGYLVPSLTRYLTLNASQITNLRSFIHKVTPHRCTQGDTDNPPLYCNPKDNSTIRALFPSLGTYDLEKAILNISKAMEQEFSATKQTLEAHQSKVSSLASASRKDHVLDIPTTQRQTACGTVGKQCCLYINYSEEIKSNIQRLHEASENLKNVPLLDWQGIFAKVGDWFR

SEQ ID NO: 177 - protein, 465 aa, Homo sapiens
LLAPVFRTLSILTNQSNCWLCEHLDNAEQPELVFVPASASTWWTYSGQWMYERVWYPQAEVQNHSTSSYRKVTWHWEASMEAQGLSFAQVRLLEGNFSLCVENKNGSGPFLGNIPKQYCNQILWFDSTDGTFMPSIDVTNESRNDDDDTSVCLGTRQCSWFAGCTNRTWNSSAVPLIGLPNTQDYKWVDRNSGLTWSGNDTCLYSCQNQTKGLLYQLFRNLFCSYGLTEAHGKWRCADASITNDKGHDGHRTPTWWLTGSNLTLSVNNSGLFFLCGNGVYKGFPPKWSGRCGLGYLVPSLTRYLTLNASQITNLRSFIHKVTPHRCTQGDTDNPPLYCNPKDNSTIRALFPSLGTYDLEKAILNISKAMEQEFSATKQTLEAHQSKVSSLASASRKDHVLDIPTTQRQTACGTVGKQCCLYINYSEEIKSNIQRLHEASENLKNVPLLDWQGIFAKVGDWFRSWG

SEQ ID NO: 178 - protein, 467 aa, Homo sapiens
QHLLAPVFRTLSILTNQSNCWLCEHLDNAEQPELVFVPASASTWWTYSGQWMYERVWYPQAEVQNHSTSSYRKVTWHWEASMEAQGLSFAQVRLLEGNFSLCVENKNGSGPFLGNIPKQYCNQILWFDSTDGTFMPSIDVTNESRNDDDDTSVCLGTRQCSWFAGCTNRTWNSSAVPLIGLPNTQDYKWVDRNSGLTWSGNDTCLYSCQNQTKGLLYQLFRNLFCSYGLTEAHGKWRCADASITNDKGHDGHRTPTWWLTGSNLTLSVNNSGLFFLCGNGVYKGFPPKWSGRCGLGYLVPSLTRYLTLNASQITNLRSFIHKVTPHRCTQGDTDNPPLYCNPKDNSTIRALFPSLGTYDLEKAILNISKAMEQEFSATKQTLEAHQSKVSSLASASRKDHVLDIPTTQRQTACGTVGKQCCLYINYSEEIKSNIQRLHEASENLKNVPLLDWQGIFAKVGDWFRSWG

SEQ ID NO: 179 - protein, 466 aa, Homo sapiens
HLLAPVFRTLSILTNQSNCWLCEHLDNAEQPELVFVPASASTWWTYSGQWMYERVWYPQAEVQNHSTSSYRKVTWHWEASMEAQGLSFAQVRLLEGNFSLCVENKNGSGPFLGNIPKQYCNQILWFDSTDGTFMPSIDVTNESRNDDDDTSVCLGTRQCSWFAGCTNRTWNSSAVPLIGLPNTQDYKWVDRNSGLTWSGNDTCLYSCQNQTKGLLYQLFRNLFCSYGLTEAHGKWRCADASITNDKGHDGHRTPTWWLTGSNLTLSVNNSGLFFLCGNGVYKGFPPKWSGRCGLGYLVPSLTRYLTLNASQITNLRSFIHKVTPHRCTQGDTDNPPLYCNPKDNSTIRALFPSLGTYDLEKAILNISKAMEQEFSATKQTLEAHQSKVSSLASASRKDHVLDIPTTQRQTACGTVGKQCCLYINYSEEIKSNIQRLHEASENLKNVPLLDWQGIFAKVGDWFRSWG

SEQ ID NO: 180 - protein, 460 aa, Homo sapiens
LLAPVFRTLSILTNQSNCWLCEHLDNAEQPELVFVPASASTWWTYSGQWMYERVWYPQAEVQNHSTSSYRKVTWHWEASMEAQGLSFAQVRLLEGNFSLCVENKNGSGPFLGNIPKQYCNQILWFDSTDGTFMPSIDVTNESRNDDDDTSVCLGTRQCSWFAGCTNRTWNSSAVPLIGLPNTQDYKWVDRNSGLTWSGNDTCLYSCQNQTKGLLYQLFRNLFCSYGLTEAHGKWRCADASITNDKGHDGHRTPTWWLTGSNLTLSVNNSGLFFLCGNGVYKGFPPKWSGRCGLGYLVPSLTRYLTLNASQITNLRSFIHKVTPHRCTQGDTDNPPLYCNPKDNSTIRALFPSLGTYDLEKAILNISKAMEQEFSATKQTLEAHQSKVSSLASASRKDHVLDIPTTQRQTACGTVGKQCCLYINYSEEIKSNIQRLHEASENLKNVPLLDWQGIFAKVGDW

SEQ ID NO: 181 - protein, 462 aa, Homo sapiens
QHLLAPVFRTLSILTNQSNCWLCEHLDNAEQPELVFVPASASTWWTYSGQWMYERVWYPQAEVQNHSTSSYRKVTWHWEASMEAQGLSFAQVRLLEGNFSLCVENKNGSGPFLGNIPKQYCNQILWFDSTDGTFMPSIDVTNESRNDDDDTSVCLGTRQCSWFAGCTNRTWNSSAVPLIGLPNTQDYKWVDRNSGLTWSGNDTCLYSCQNQTKGLLYQLFRNLFCSYGLTEAHGKWRCADASITNDKGHDGHRTPTWWLTGSNLTLSVNNSGLFFLCGNGVYKGFPPKWSGRCGLGYLVPSLTRYLTLNASQITNLRSFIHKVTPHRCTQGDTDNPPLYCNPKDNSTIRALFPSLGTYDLEKAILNISKAMEQEFSATKQTLEAHQSKVSSLASASRKDHVLDIPTTQRQTACGTVGKQCCLYINYSEEIKSNIQRLHEASENLKNVPLLDWQGIFAKVGDW

SEQ ID NO: 182 - protein, 461 aa, Homo sapiens
HLLAPVFRTLSILTNQSNCWLCEHLDNAEQPELVFVPASASTWWTYSGQWMYERVWYPQAEVQNHSTSSYRKVTWHWEASMEAQGLSFAQVRLLEGNFSLCVENKNGSGPFLGNIPKQYCNQILWFDSTDGTFMPSIDVTNESRNDDDDTSVCLGTRQCSWFAGCTNRTWNSSAVPLIGLPNTQDYKWVDRNSGLTWSGNDTCLYSCQNQTKGLLYQLFRNLFCSYGLTEAHGKWRCADASITNDKGHDGHRTPTWWLTGSNLTLSVNNSGLFFLCGNGVYKGFPPKWSGRCGLGYLVPSLTRYLTLNASQITNLRSFIHKVTPHRCTQGDTDNPPLYCNPKDNSTIRALFPSLGTYDLEKAILNISKAMEQEFSATKQTLEAHQSKVSSLASASRKDHVLDIPTTQRQTACGTVGKQCCLYINYSEEIKSNIQRLHEASENLKNVPLLDWQGIFAKVGDW

SEQ ID NO: 183 - protein, 408 aa, Homo sapiens
QHLLAPVFRTLSILTNQSNCWLCEHLDNAEQPELVFVPASASTWWTYSGQWMYERVWYPQAEVQNHSTSSYRKVTWHWEASMEAQGLSFAQVRLLEGNFSLCVENKNGSGPFLGNIPKQYCNQILWFDSTDGTFMPSIDVTNESRNDDDDTSVCLGTRQCSWFAGCTNRTWNSSAVPLIGLPNTQDYKWVDRNSGLTWSGNDTCLYSCQNQTKGLLYQLFRNLFCSYGLTEAHGKWRCADASITNDKGHDGHRTPTWWLTGSNLTLSVNNSGLFFLCGNGVYKGFPPKWSGRCGLGYLVPSLTRYLTLNASQITNLRSFIHKVTPHRCTQGDTDNPPLYCNPKDNSTIRALFPSLGTYDLEKAILNISKAMEQEFSATKQTLEAHQSKVSSLASASRKDHVLDIPTTQ

SEQ ID NO: 184 - protein, 409 aa, Homo sapiens
QHLLAPVFRTLSILTNQSNCWLCEHLDNAEQPELVFVPASASTWWTYSGQWMYERVWYPQAEVQNHSTSSYRKVTWHWEASMEAQGLSFAQVRLLEGNFSLCVENKNGSGPFLGNIPKQYCNQILWFDSTDGTFMPSIDVTNESRNDDDDTSVCLGTRQCSWFAGCTNRTWNSSAVPLIGLPNTQDYKWVDRNSGLTWSGNDTCLYSCQNQTKGLLYQLFRNLFCSYGLTEAHGKWRCADASITNDKGHDGHRTPTWWLTGSNLTLSVNNSGLFFLCGNGVYKGFPPKWSGRCGLGYLVPSLTRYLTLNASQITNLRSFIHKVTPHRCTQGDTDNPPLYCNPKDNSTIRALFPSLGTYDLEKAILNISKAMEQEFSATKQTLEAHQSKVSSLASASRKDHVLDIPTTQR

SEQ ID NO: 185 - protein, 407 aa, Homo sapiens
HLLAPVFRTLSILTNQSNCWLCEHLDNAEQPELVFVPASASTWWTYSGQWMYERVWYPQAEVQNHSTSSYRKVTWHWEASMEAQGLSFAQVRLLEGNFSLCVENKNGSGPFLGNIPKQYCNQILWFDSTDGTFMPSIDVTNESRNDDDDTSVCLGTRQCSWFAGCTNRTWNSSAVPLIGLPNTQDYKWVDRNSGLTWSGNDTCLYSCQNQTKGLLYQLFRNLFCSYGLTEAHGKWRCADASITNDKGHDGHRTPTWWLTGSNLTLSVNNSGLFFLCGNGVYKGFPPKWSGRCGLGYLVPSLTRYLTLNASQITNLRSFIHKVTPHRCTQGDTDNPPLYCNPKDNSTIRALFPSLGTYDLEKAILNISKAMEQEFSATKQTLEAHQSKVSSLASASRKDHVLDIPTTQ

SEQ ID NO: 186 - protein, 408 aa, Homo sapiens
HLLAPVFRTLSILTNQSNCWLCEHLDNAEQPELVFVPASASTWWTYSGQWMYERVWYPQAEVQNHSTSSYRKVTWHWEASMEAQGLSFAQVRLLEGNFSLCVENKNGSGPFLGNIPKQYCNQILWFDSTDGTFMPSIDVTNESRNDDDDTSVCLGTRQCSWFAGCTNRTWNSSAVPLIGLPNTQDYKWVDRNSGLTWSGNDTCLYSCQNQTKGLLYQLFRNLFCSYGLTEAHGKWRCADASITNDKGHDGHRTPTWWLTGSNLTLSVNNSGLFFLCGNGVYKGFPPKWSGRCGLGYLVPSLTRYLTLNASQITNLRSFIHKVTPHRCTQGDTDNPPLYCNPKDNSTIRALFPSLGTYDLEKAILNISKAMEQEFSATKQTLEAHQSKVSSLASASRKDHVLDIPTTQR

SEQ ID NO: 187 - protein, 10 aa, Homo sapiens
  MISC_FEATURE (2)..(8): each Xaa is any aa
CXXXXXXXCC

SEQ ID NO: 188 - protein, 8 aa, Homo sapiens
  MISC_FEATURE (2)..(6): each Xaa is any aa
CXXXXXCC

SEQ ID NO: 189 - protein, 56 aa, Homo sapiens
RQTACGTVGKQCCLYINYSEEIKSNIQRLHEASENLKNVPLLDWQGIFAKVGDWFR

SEQ ID NO: 190 - protein, 55 aa, Homo sapiens
QTACGTVGKQCCLYINYSEEIKSNIQRLHEASENLKNVPLLDWQGIFAKVGDWFR

SEQ ID NO: 191 - protein, 59 aa, Homo sapiens
RQTACGTVGKQCCLYINYSEEIKSNIQRLHEASENLKNVPLLDWQGIFAKVGDWFRSWG

SEQ ID NO: 192 - protein, 58 aa, Homo sapiens
QTACGTVGKQCCLYINYSEEIKSNIQRLHEASENLKNVPLLDWQGIFAKVGDWFRSWG

SEQ ID NO: 193 - protein, 54 aa, Homo sapiens
RQTACGTVGKQCCLYINYSEEIKSNIQRLHEASENLKNVPLLDWQGIFAKVGDW

SEQ ID NO: 194 - protein, 53 aa, Homo sapiens
QTACGTVGKQCCLYINYSEEIKSNIQRLHEASENLKNVPLLDWQGIFAKVGDW

SEQ ID NO: 195 - protein, 376 aa, Homo sapiens
QHLLAPVFRTLSILTNQSNCWLCEHLDNAEQPELVFVPASASTWWTYSGQWMYERVWYPQAEVQNHSTSSYRKVTWHWEASMEAQGLSFAQVRLLEGNFSLCVENKNGSGPFLGNIPKQYCNQILWFDSTDGTFMPSIDVTNESRNDDDDTSVCLGTRQCSWFAGCTNRTWNSSAVPLIGLPNTQDYKWVDRNSGLTWSGNDTCLYSCQNQTKGLLYQLFRNLFCSYGLTEAHGKWRCADASITNDKGHDGHRTPTWWLTGSNLTLSVNNSGLFFLCGNGVYKGFPPKWSGRCGLGYLVPSLTRYLTLNASQITNLRSFIHKVTPHRCTQGDTDNPPLYCNPKDNSTIRALFPSLGTYDLEKAILNISKAMEQEFS

SEQ ID NO: 196 - protein, 377 aa, Homo sapiens
QHLLAPVFRTLSILTNQSNCWLCEHLDNAEQPELVFVPASASTWWTYSGQWMYERVWYPQAEVQNHSTSSYRKVTWHWEASMEAQGLSFAQVRLLEGNFSLCVENKNGSGPFLGNIPKQYCNQILWFDSTDGTFMPSIDVTNESRNDDDDTSVCLGTRQCSWFAGCTNRTWNSSAVPLIGLPNTQDYKWVDRNSGLTWSGNDTCLYSCQNQTKGLLYQLFRNLFCSYGLTEAHGKWRCADASITNDKGHDGHRTPTWWLTGSNLTLSVNNSGLFFLCGNGVYKGFPPKWSGRCGLGYLVPSLTRYLTLNASQITNLRSFIHKVTPHRCTQGDTDNPPLYCNPKDNSTIRALFPSLGTYDLEKAILNISKAMEQEFSA

SEQ ID NO: 197 - protein, 378 aa, Homo sapiens
QHLLAPVFRTLSILTNQSNCWLCEHLDNAEQPELVFVPASASTWWTYSGQWMYERVWYPQAEVQNHSTSSYRKVTWHWEASMEAQGLSFAQVRLLEGNFSLCVENKNGSGPFLGNIPKQYCNQILWFDSTDGTFMPSIDVTNESRNDDDDTSVCLGTRQCSWFAGCTNRTWNSSAVPLIGLPNTQDYKWVDRNSGLTWSGNDTCLYSCQNQTKGLLYQLFRNLFCSYGLTEAHGKWRCADASITNDKGHDGHRTPTWWLTGSNLTLSVNNSGLFFLCGNGVYKGFPPKWSGRCGLGYLVPSLTRYLTLNASQITNLRSFIHKVTPHRCTQGDTDNPPLYCNPKDNSTIRALFPSLGTYDLEKAILNISKAMEQEFSAT

SEQ ID NO: 198 - protein, 379 aa, Homo sapiens
QHLLAPVFRTLSILTNQSNCWLCEHLDNAEQPELVFVPASASTWWTYSGQWMYERVWYPQAEVQNHSTSSYRKVTWHWEASMEAQGLSFAQVRLLEGNFSLCVENKNGSGPFLGNIPKQYCNQILWFDSTDGTFMPSIDVTNESRNDDDDTSVCLGTRQCSWFAGCTNRTWNSSAVPLIGLPNTQDYKWVDRNSGLTWSGNDTCLYSCQNQTKGLLYQLFRNLFCSYGLTEAHGKWRCADASITNDKGHDGHRTPTWWLTGSNLTLSVNNSGLFFLCGNGVYKGFPPKWSGRCGLGYLVPSLTRYLTLNASQITNLRSFIHKVTPHRCTQGDTDNPPLYCNPKDNSTIRALFPSLGTYDLEKAILNISKAMEQEFSATK

SEQ ID NO: 199 - protein, 380 aa, Homo sapiens
QHLLAPVFRTLSILTNQSNCWLCEHLDNAEQPELVFVPASASTWWTYSGQWMYERVWYPQAEVQNHSTSSYRKVTWHWEASMEAQGLSFAQVRLLEGNFSLCVENKNGSGPFLGNIPKQYCNQILWFDSTDGTFMPSIDVTNESRNDDDDTSVCLGTRQCSWFAGCTNRTWNSSAVPLIGLPNTQDYKWVDRNSGLTWSGNDTCLYSCQNQTKGLLYQLFRNLFCSYGLTEAHGKWRCADASITNDKGHDGHRTPTWWLTGSNLTLSVNNSGLFFLCGNGVYKGFPPKWSGRCGLGYLVPSLTRYLTLNASQITNLRSFIHKVTPHRCTQGDTDNPPLYCNPKDNSTIRALFPSLGTYDLEKAILNISKAMEQEFSATKQ

SEQ ID NO: 200 - protein, 381 aa, Homo sapiens
QHLLAPVFRTLSILTNQSNCWLCEHLDNAEQPELVFVPASASTWWTYSGQWMYERVWYPQAEVQNHSTSSYRKVTWHWEASMEAQGLSFAQVRLLEGNFSLCVENKNGSGPFLGNIPKQYCNQILWFDSTDGTFMPSIDVTNESRNDDDDTSVCLGTRQCSWFAGCTNRTWNSSAVPLIGLPNTQDYKWVDRNSGLTWSGNDTCLYSCQNQTKGLLYQLFRNLFCSYGLTEAHGKWRCADASITNDKGHDGHRTPTWWLTGSNLTLSVNNSGLFFLCGNGVYKGFPPKWSGRCGLGYLVPSLTRYLTLNASQITNLRSFIHKVTPHRCTQGDTDNPPLYCNPKDNSTIRALFPSLGTYDLEKAILNISKAMEQEFSATKQT

SEQ ID NO: 201 - protein, 382 aa, Homo sapiens
QHLLAPVFRTLSILTNQSNCWLCEHLDNAEQPELVFVPASASTWWTYSGQWMYERVWYPQAEVQNHSTSSYRKVTWHWEASMEAQGLSFAQVRLLEGNFSLCVENKNGSGPFLGNIPKQYCNQILWFDSTDGTFMPSIDVTNESRNDDDDTSVCLGTRQCSWFAGCTNRTWNSSAVPLIGLPNTQDYKWVDRNSGLTWSGNDTCLYSCQNQTKGLLYQLFRNLFCSYGLTEAHGKWRCADASITNDKGHDGHRTPTWWLTGSNLTLSVNNSGLFFLCGNGVYKGFPPKWSGRCGLGYLVPSLTRYLTLNASQITNLRSFIHKVTPHRCTQGDTDNPPLYCNPKDNSTIRALFPSLGTYDLEKAILNISKAMEQEFSATKQTL

SEQ ID NO: 202 - protein, 383 aa, Homo sapiens
QHLLAPVFRTLSILTNQSNCWLCEHLDNAEQPELVFVPASASTWWTYSGQWMYERVWYPQAEVQNHSTSSYRKVTWHWEASMEAQGLSFAQVRLLEGNFSLCVENKNGSGPFLGNIPKQYCNQILWFDSTDGTFMPSIDVTNESRNDDDDTSVCLGTRQCSWFAGCTNRTWNSSAVPLIGLPNTQDYKWVDRNSGLTWSGNDTCLYSCQNQTKGLLYQLFRNLFCSYGLTEAHGKWRCADASITNDKGHDGHRTPTWWLTGSNLTLSVNNSGLFFLCGNGVYKGFPPKWSGRCGLGYLVPSLTRYLTLNASQITNLRSFIHKVTPHRCTQGDTDNPPLYCNPKDNSTIRALFPSLGTYDLEKAILNISKAMEQEFSATKQTLE

SEQ ID NO: 203 - protein, 384 aa, Homo sapiens
QHLLAPVFRTLSILTNQSNCWLCEHLDNAEQPELVFVPASASTWWTYSGQWMYERVWYPQAEVQNHSTSSYRKVTWHWEASMEAQGLSFAQVRLLEGNFSLCVENKNGSGPFLGNIPKQYCNQILWFDSTDGTFMPSIDVTNESRNDDDDTSVCLGTRQCSWFAGCTNRTWNSSAVPLIGLPNTQDYKWVDRNSGLTWSGNDTCLYSCQNQTKGLLYQLFRNLFCSYGLTEAHGKWRCADASITNDKGHDGHRTPTWWLTGSNLTLSVNNSGLFFLCGNGVYKGFPPKWSGRCGLGYLVPSLTRYLTLNASQITNLRSFIHKVTPHRCTQGDTDNPPLYCNPKDNSTIRALFPSLGTYDLEKAILNISKAMEQEFSATKQTLEA

SEQ ID NO: 204 - protein, 385 aa, Homo sapiens
QHLLAPVFRTLSILTNQSNCWLCEHLDNAEQPELVFVPASASTWWTYSGQWMYERVWYPQAEVQNHSTSSYRKVTWHWEASMEAQGLSFAQVRLLEGNFSLCVENKNGSGPFLGNIPKQYCNQILWFDSTDGTFMPSIDVTNESRNDDDDTSVCLGTRQCSWFAGCTNRTWNSSAVPLIGLPNTQDYKWVDRNSGLTWSGNDTCLYSCQNQTKGLLYQLFRNLFCSYGLTEAHGKWRCADASITNDKGHDGHRTPTWWLTGSNLTLSVNNSGLFFLCGNGVYKGFPPKWSGRCGLGYLVPSLTRYLTLNASQITNLRSFIHKVTPHRCTQGDTDNPPLYCNPKDNSTIRALFPSLGTYDLEKAILNISKAMEQEFSATKQTLEAH

SEQ ID NO: 205 - protein, 386 aa, Homo sapiens
QHLLAPVFRTLSILTNQSNCWLCEHLDNAEQPELVFVPASASTWWTYSGQWMYERVWYPQAEVQNHSTSSYRKVTWHWEASMEAQGLSFAQVRLLEGNFSLCVENKNGSGPFLGNIPKQYCNQILWFDSTDGTFMPSIDVTNESRNDDDDTSVCLGTRQCSWFAGCTNRTWNSSAVPLIGLPNTQDYKWVDRNSGLTWSGNDTCLYSCQNQTKGLLYQLFRNLFCSYGLTEAHGKWRCADASITNDKGHDGHRTPTWWLTGSNLTLSVNNSGLFFLCGNGVYKGFPPKWSGRCGLGYLVPSLTRYLTLNASQITNLRSFIHKVTPHRCTQGDTDNPPLYCNPKDNSTIRALFPSLGTYDLEKAILNISKAMEQEFSATKQTLEAHQ

SEQ ID NO: 206 - protein, 387 aa, Homo sapiens
QHLLAPVFRTLSILTNQSNCWLCEHLDNAEQPELVFVPASASTWWTYSGQWMYERVWYPQAEVQNHSTSSYRKVTWHWEASMEAQGLSFAQVRLLEGNFSLCVENKNGSGPFLGNIPKQYCNQILWFDSTDGTFMPSIDVTNESRNDDDDTSVCLGTRQCSWFAGCTNRTWNSSAVPLIGLPNTQDYKWVDRNSGLTWSGNDTCLYSCQNQTKGLLYQLFRNLFCSYGLTEAHGKWRCADASITNDKGHDGHRTPTWWLTGSNLTLSVNNSGLFFLCGNGVYKGFPPKWSGRCGLGYLVPSLTRYLTLNASQITNLRSFIHKVTPHRCTQGDTDNPPLYCNPKDNSTIRALFPSLGTYDLEKAILNISKAMEQEFSATKQTLEAHQS

SEQ ID NO: 207 - protein, 388 aa, Homo sapiens
QHLLAPVFRTLSILTNQSNCWLCEHLDNAEQPELVFVPASASTWWTYSGQWMYERVWYPQAEVQNHSTSSYRKVTWHWEASMEAQGLSFAQVRLLEGNFSLCVENKNGSGPFLGNIPKQYCNQILWFDSTDGTFMPSIDVTNESRNDDDDTSVCLGTRQCSWFAGCTNRTWNSSAVPLIGLPNTQDYKWVDRNSGLTWSGNDTCLYSCQNQTKGLLYQLFRNLFCSYGLTEAHGKWRCADASITNDKGHDGHRTPTWWLTGSNLTLSVNNSGLFFLCGNGVYKGFPPKWSGRCGLGYLVPSLTRYLTLNASQITNLRSFIHKVTPHRCTQGDTDNPPLYCNPKDNSTIRALFPSLGTYDLEKAILNISKAMEQEFSATKQTLEAHQSK

SEQ ID NO: 208 - protein, 389 aa, Homo sapiens
QHLLAPVFRTLSILTNQSNCWLCEHLDNAEQPELVFVPASASTWWTYSGQWMYERVWYPQAEVQNHSTSSYRKVTWHWEASMEAQGLSFAQVRLLEGNFSLCVENKNGSGPFLGNIPKQYCNQILWFDSTDGTFMPSIDVTNESRNDDDDTSVCLGTRQCSWFAGCTNRTWNSSAVPLIGLPNTQDYKWVDRNSGLTWSGNDTCLYSCQNQTKGLLYQLFRNLFCSYGLTEAHGKWRCADASITNDKGHDGHRTPTWWLTGSNLTLSVNNSGLFFLCGNGVYKGFPPKWSGRCGLGYLVPSLTRYLTLNASQITNLRSFIHKVTPHRCTQGDTDNPPLYCNPKDNSTIRALFPSLGTYDLEKAILNISKAMEQEFSATKQTLEAHQSKV

SEQ ID NO: 209 - protein, 390 aa, Homo sapiens
QHLLAPVFRTLSILTNQSNCWLCEHLDNAEQPELVFVPASASTWWTYSGQWMYERVWYPQAEVQNHSTSSYRKVTWHWEASMEAQGLSFAQVRLLEGNFSLCVENKNGSGPFLGNIPKQYCNQILWFDSTDGTFMPSIDVTNESRNDDDDTSVCLGTRQCSWFAGCTNRTWNSSAVPLIGLPNTQDYKWVDRNSGLTWSGNDTCLYSCQNQTKGLLYQLFRNLFCSYGLTEAHGKWRCADASITNDKGHDGHRTPTWWLTGSNLTLSVNNSGLFFLCGNGVYKGFPPKWSGRCGLGYLVPSLTRYLTLNASQITNLRSFIHKVTPHRCTQGDTDNPPLYCNPKDNSTIRALFPSLGTYDLEKAILNISKAMEQEFSATKQTLEAHQSKVS

SEQ ID NO: 210 - protein, 391 aa, Homo sapiens
QHLLAPVFRTLSILTNQSNCWLCEHLDNAEQPELVFVPASASTWWTYSGQWMYERVWYPQAEVQNHSTSSYRKVTWHWEASMEAQGLSFAQVRLLEGNFSLCVENKNGSGPFLGNIPKQYCNQILWFDSTDGTFMPSIDVTNESRNDDDDTSVCLGTRQCSWFAGCTNRTWNSSAVPLIGLPNTQDYKWVDRNSGLTWSGNDTCLYSCQNQTKGLLYQLFRNLFCSYGLTEAHGKWRCADASITNDKGHDGHRTPTWWLTGSNLTLSVNNSGLFFLCGNGVYKGFPPKWSGRCGLGYLVPSLTRYLTLNASQITNLRSFIHKVTPHRCTQGDTDNPPLYCNPKDNSTIRALFPSLGTYDLEKAILNISKAMEQEFSATKQTLEAHQSKVSS

SEQ ID NO: 211 - protein, 392 aa, Homo sapiens
QHLLAPVFRTLSILTNQSNCWLCEHLDNAEQPELVFVPASASTWWTYSGQWMYERVWYPQAEVQNHSTSSYRKVTWHWEASMEAQGLSFAQVRLLEGNFSLCVENKNGSGPFLGNIPKQYCNQILWFDSTDGTFMPSIDVTNESRNDDDDTSVCLGTRQCSWFAGCTNRTWNSSAVPLIGLPNTQDYKWVDRNSGLTWSGNDTCLYSCQNQTKGLLYQLFRNLFCSYGLTEAHGKWRCADASITNDKGHDGHRTPTWWLTGSNLTLSVNNSGLFFLCGNGVYKGFPPKWSGRCGLGYLVPSLTRYLTLNASQITNLRSFIHKVTPHRCTQGDTDNPPLYCNPKDNSTIRALFPSLGTYDLEKAILNISKAMEQEFSATKQTLEAHQSKVSSL

SEQ ID NO: 212 - protein, 393 aa, Homo sapiens
QHLLAPVFRTLSILTNQSNCWLCEHLDNAEQPELVFVPASASTWWTYSGQWMYERVWYPQAEVQNHSTSSYRKVTWHWEASMEAQGLSFAQVRLLEGNFSLCVENKNGSGPFLGNIPKQYCNQILWFDSTDGTFMPSIDVTNESRNDDDDTSVCLGTRQCSWFAGCTNRTWNSSAVPLIGLPNTQDYKWVDRNSGLTWSGNDTCLYSCQNQTKGLLYQLFRNLFCSYGLTEAHGKWRCADASITNDKGHDGHRTPTWWLTGSNLTLSVNNSGLFFLCGNGVYKGFPPKWSGRCGLGYLVPSLTRYLTLNASQITNLRSFIHKVTPHRCTQGDTDNPPLYCNPKDNSTIRALFPSLGTYDLEKAILNISKAMEQEFSATKQTLEAHQSKVSSLA

SEQ ID NO: 213 - protein, 394 aa, Homo sapiens
QHLLAPVFRTLSILTNQSNCWLCEHLDNAEQPELVFVPASASTWWTYSGQWMYERVWYPQAEVQNHSTSSYRKVTWHWEASMEAQGLSFAQVRLLEGNFSLCVENKNGSGPFLGNIPKQYCNQILWFDSTDGTFMPSIDVTNESRNDDDDTSVCLGTRQCSWFAGCTNRTWNSSAVPLIGLPNTQDYKWVDRNSGLTWSGNDTCLYSCQNQTKGLLYQLFRNLFCSYGLTEAHGKWRCADASITNDKGHDGHRTPTWWLTGSNLTLSVNNSGLFFLCGNGVYKGFPPKWSGRCGLGYLVPSLTRYLTLNASQITNLRSFIHKVTPHRCTQGDTDNPPLYCNPKDNSTIRALFPSLGTYDLEKAILNISKAMEQEFSATKQTLEAHQSKVSSLAS

SEQ ID NO: 214 - protein, 395 aa, Homo sapiens
QHLLAPVFRTLSILTNQSNCWLCEHLDNAEQPELVFVPASASTWWTYSGQWMYERVWYPQAEVQNHSTSSYRKVTWHWEASMEAQGLSFAQVRLLEGNFSLCVENKNGSGPFLGNIPKQYCNQILWFDSTDGTFMPSIDVTNESRNDDDDTSVCLGTRQCSWFAGCTNRTWNSSAVPLIGLPNTQDYKWVDRNSGLTWSGNDTCLYSCQNQTKGLLYQLFRNLFCSYGLTEAHGKWRCADASITNDKGHDGHRTPTWWLTGSNLTLSVNNSGLFFLCGNGVYKGFPPKWSGRCGLGYLVPSLTRYLTLNASQITNLRSFIHKVTPHRCTQGDTDNPPLYCNPKDNSTIRALFPSLGTYDLEKAILNISKAMEQEFSATKQTLEAHQSKVSSLASA

SEQ ID NO: 215 - protein, 396 aa, Homo sapiens
QHLLAPVFRTLSILTNQSNCWLCEHLDNAEQPELVFVPASASTWWTYSGQWMYERVWYPQAEVQNHSTSSYRKVTWHWEASMEAQGLSFAQVRLLEGNFSLCVENKNGSGPFLGNIPKQYCNQILWFDSTDGTFMPSIDVTNESRNDDDDTSVCLGTRQCSWFAGCTNRTWNSSAVPLIGLPNTQDYKWVDRNSGLTWSGNDTCLYSCQNQTKGLLYQLFRNLFCSYGLTEAHGKWRCADASITNDKGHDGHRTPTWWLTGSNLTLSVNNSGLFFLCGNGVYKGFPPKWSGRCGLGYLVPSLTRYLTLNASQITNLRSFIHKVTPHRCTQGDTDNPPLYCNPKDNSTIRALFPSLGTYDLEKAILNISKAMEQEFSATKQTLEAHQSKVSSLASAS

SEQ ID NO: 216 - protein, 375 aa, Homo sapiens
HLLAPVFRTLSILTNQSNCWLCEHLDNAEQPELVFVPASASTWWTYSGQWMYERVWYPQAEVQNHSTSSYRKVTWHWEASMEAQGLSFAQVRLLEGNFSLCVENKNGSGPFLGNIPKQYCNQILWFDSTDGTFMPSIDVTNESRNDDDDTSVCLGTRQCSWFAGCTNRTWNSSAVPLIGLPNTQDYKWVDRNSGLTWSGNDTCLYSCQNQTKGLLYQLFRNLFCSYGLTEAHGKWRCADASITNDKGHDGHRTPTWWLTGSNLTLSVNNSGLFFLCGNGVYKGFPPKWSGRCGLGYLVPSLTRYLTLNASQITNLRSFIHKVTPHRCTQGDTDNPPLYCNPKDNSTIRALFPSLGTYDLEKAILNISKAMEQEFS

SEQ ID NO: 217 - protein, 376 aa, Homo sapiens
HLLAPVFRTLSILTNQSNCWLCEHLDNAEQPELVFVPASASTWWTYSGQWMYERVWYPQAEVQNHSTSSYRKVTWHWEASMEAQGLSFAQVRLLEGNFSLCVENKNGSGPFLGNIPKQYCNQILWFDSTDGTFMPSIDVTNESRNDDDDTSVCLGTRQCSWFAGCTNRTWNSSAVPLIGLPNTQDYKWVDRNSGLTWSGNDTCLYSCQNQTKGLLYQLFRNLFCSYGLTEAHGKWRCADASITNDKGHDGHRTPTWWLTGSNLTLSVNNSGLFFLCGNGVYKGFPPKWSGRCGLGYLVPSLTRYLTLNASQITNLRSFIHKVTPHRCTQGDTDNPPLYCNPKDNSTIRALFPSLGTYDLEKAILNISKAMEQEFSA

SEQ ID NO: 218 - protein, 377 aa, Homo sapiens
HLLAPVFRTLSILTNQSNCWLCEHLDNAEQPELVFVPASASTWWTYSGQWMYERVWYPQAEVQNHSTSSYRKVTWHWEASMEAQGLSFAQVRLLEGNFSLCVENKNGSGPFLGNIPKQYCNQILWFDSTDGTFMPSIDVTNESRNDDDDTSVCLGTRQCSWFAGCTNRTWNSSAVPLIGLPNTQDYKWVDRNSGLTWSGNDTCLYSCQNQTKGLLYQLFRNLFCSYGLTEAHGKWRCADASITNDKGHDGHRTPTWWLTGSNLTLSVNNSGLFFLCGNGVYKGFPPKWSGRCGLGYLVPSLTRYLTLNASQITNLRSFIHKVTPHRCTQGDTDNPPLYCNPKDNSTIRALFPSLGTYDLEKAILNISKAMEQEFSAT

SEQ ID NO: 219 - protein, 378 aa, Homo sapiens
HLLAPVFRTLSILTNQSNCWLCEHLDNAEQPELVFVPASASTWWTYSGQWMYERVWYPQAEVQNHSTSSYRKVTWHWEASMEAQGLSFAQVRLLEGNFSLCVENKNGSGPFLGNIPKQYCNQILWFDSTDGTFMPSIDVTNESRNDDDDTSVCLGTRQCSWFAGCTNRTWNSSAVPLIGLPNTQDYKWVDRNSGLTWSGNDTCLYSCQNQTKGLLYQLFRNLFCSYGLTEAHGKWRCADASITNDKGHDGHRTPTWWLTGSNLTLSVNNSGLFFLCGNGVYKGFPPKWSGRCGLGYLVPSLTRYLTLNASQITNLRSFIHKVTPHRCTQGDTDNPPLYCNPKDNSTIRALFPSLGTYDLEKAILNISKAMEQEFSATK

SEQ ID NO: 220 - protein, 379 aa, Homo sapiens
HLLAPVFRTLSILTNQSNCWLCEHLDNAEQPELVFVPASASTWWTYSGQWMYERVWYPQAEVQNHSTSSYRKVTWHWEASMEAQGLSFAQVRLLEGNFSLCVENKNGSGPFLGNIPKQYCNQILWFDSTDGTFMPSIDVTNESRNDDDDTSVCLGTRQCSWFAGCTNRTWNSSAVPLIGLPNTQDYKWVDRNSGLTWSGNDTCLYSCQNQTKGLLYQLFRNLFCSYGLTEAHGKWRCADASITNDKGHDGHRTPTWWLTGSNLTLSVNNSGLFFLCGNGVYKGFPPKWSGRCGLGYLVPSLTRYLTLNASQITNLRSFIHKVTPHRCTQGDTDNPPLYCNPKDNSTIRALFPSLGTYDLEKAILNISKAMEQEFSATKQ

SEQ ID NO: 221 - protein, 380 aa, Homo sapiens
HLLAPVFRTLSILTNQSNCWLCEHLDNAEQPELVFVPASASTWWTYSGQWMYERVWYPQAEVQNHSTSSYRKVTWHWEASMEAQGLSFAQVRLLEGNFSLCVENKNGSGPFLGNIPKQYCNQILWFDSTDGTFMPSIDVTNESRNDDDDTSVCLGTRQCSWFAGCTNRTWNSSAVPLIGLPNTQDYKWVDRNSGLTWSGNDTCLYSCQNQTKGLLYQLFRNLFCSYGLTEAHGKWRCADASITNDKGHDGHRTPTWWLTGSNLTLSVNNSGLFFLCGNGVYKGFPPKWSGRCGLGYLVPSLTRYLTLNASQITNLRSFIHKVTPHRCTQGDTDNPPLYCNPKDNSTIRALFPSLGTYDLEKAILNISKAMEQEFSATKQT

SEQ ID NO: 222 - protein, 381 aa, Homo sapiens
HLLAPVFRTLSILTNQSNCWLCEHLDNAEQPELVFVPASASTWWTYSGQWMYERVWYPQAEVQNHSTSSYRKVTWHWEASMEAQGLSFAQVRLLEGNFSLCVENKNGSGPFLGNIPKQYCNQILWFDSTDGTFMPSIDVTNESRNDDDDTSVCLGTRQCSWFAGCTNRTWNSSAVPLIGLPNTQDYKWVDRNSGLTWSGNDTCLYSCQNQTKGLLYQLFRNLFCSYGLTEAHGKWRCADASITNDKGHDGHRTPTWWLTGSNLTLSVNNSGLFFLCGNGVYKGFPPKWSGRCGLGYLVPSLTRYLTLNASQITNLRSFIHKVTPHRCTQGDTDNPPLYCNPKDNSTIRALFPSLGTYDLEKAILNISKAMEQEFSATKQTL

SEQ ID NO: 223 - protein, 382 aa, Homo sapiens
HLLAPVFRTLSILTNQSNCWLCEHLDNAEQPELVFVPASASTWWTYSGQWMYERVWYPQAEVQNHSTSSYRKVTWHWEASMEAQGLSFAQVRLLEGNFSLCVENKNGSGPFLGNIPKQYCNQILWFDSTDGTFMPSIDVTNESRNDDDDTSVCLGTRQCSWFAGCTNRTWNSSAVPLIGLPNTQDYKWVDRNSGLTWSGNDTCLYSCQNQTKGLLYQLFRNLFCSYGLTEAHGKWRCADASITNDKGHDGHRTPTWWLTGSNLTLSVNNSGLFFLCGNGVYKGFPPKWSGRCGLGYLVPSLTRYLTLNASQITNLRSFIHKVTPHRCTQGDTDNPPLYCNPKDNSTIRALFPSLGTYDLEKAILNISKAMEQEFSATKQTLE

SEQ ID NO: 224 - protein, 383 aa, Homo sapiens
HLLAPVFRTLSILTNQSNCWLCEHLDNAEQPELVFVPASASTWWTYSGQWMYERVWYPQAEVQNHSTSSYRKVTWHWEASMEAQGLSFAQVRLLEGNFSLCVENKNGSGPFLGNIPKQYCNQILWFDSTDGTFMPSIDVTNESRNDDDDTSVCLGTRQCSWFAGCTNRTWNSSAVPLIGLPNTQDYKWVDRNSGLTWSGNDTCLYSCQNQTKGLLYQLFRNLFCSYGLTEAHGKWRCADASITNDKGHDGHRTPTWWLTGSNLTLSVNNSGLFFLCGNGVYKGFPPKWSGRCGLGYLVPSLTRYLTLNASQITNLRSFIHKVTPHRCTQGDTDNPPLYCNPKDNSTIRALFPSLGTYDLEKAILNISKAMEQEFSATKQTLEA

SEQ ID NO: 225 - protein, 384 aa, Homo sapiens
HLLAPVFRTLSILTNQSNCWLCEHLDNAEQPELVFVPASASTWWTYSGQWMYERVWYPQAEVQNHSTSSYRKVTWHWEASMEAQGLSFAQVRLLEGNFSLCVENKNGSGPFLGNIPKQYCNQILWFDSTDGTFMPSIDVTNESRNDDDDTSVCLGTRQCSWFAGCTNRTWNSSAVPLIGLPNTQDYKWVDRNSGLTWSGNDTCLYSCQNQTKGLLYQLFRNLFCSYGLTEAHGKWRCADASITNDKGHDGHRTPTWWLTGSNLTLSVNNSGLFFLCGNGVYKGFPPKWSGRCGLGYLVPSLTRYLTLNASQITNLRSFIHKVTPHRCTQGDTDNPPLYCNPKDNSTIRALFPSLGTYDLEKAILNISKAMEQEFSATKQTLEAH

SEQ ID NO: 226 - protein, 385 aa, Homo sapiens
HLLAPVFRTLSILTNQSNCWLCEHLDNAEQPELVFVPASASTWWTYSGQWMYERVWYPQAEVQNHSTSSYRKVTWHWEASMEAQGLSFAQVRLLEGNFSLCVENKNGSGPFLGNIPKQYCNQILWFDSTDGTFMPSIDVTNESRNDDDDTSVCLGTRQCSWFAGCTNRTWNSSAVPLIGLPNTQDYKWVDRNSGLTWSGNDTCLYSCQNQTKGLLYQLFRNLFCSYGLTEAHGKWRCADASITNDKGHDGHRTPTWWLTGSNLTLSVNNSGLFFLCGNGVYKGFPPKWSGRCGLGYLVPSLTRYLTLNASQITNLRSFIHKVTPHRCTQGDTDNPPLYCNPKDNSTIRALFPSLGTYDLEKAILNISKAMEQEFSATKQTLEAHQ

SEQ ID NO: 227 - protein, 386 aa, Homo sapiens
HLLAPVFRTLSILTNQSNCWLCEHLDNAEQPELVFVPASASTWWTYSGQWMYERVWYPQAEVQNHSTSSYRKVTWHWEASMEAQGLSFAQVRLLEGNFSLCVENKNGSGPFLGNIPKQYCNQILWFDSTDGTFMPSIDVTNESRNDDDDTSVCLGTRQCSWFAGCTNRTWNSSAVPLIGLPNTQDYKWVDRNSGLTWSGNDTCLYSCQNQTKGLLYQLFRNLFCSYGLTEAHGKWRCADASITNDKGHDGHRTPTWWLTGSNLTLSVNNSGLFFLCGNGVYKGFPPKWSGRCGLGYLVPSLTRYLTLNASQITNLRSFIHKVTPHRCTQGDTDNPPLYCNPKDNSTIRALFPSLGTYDLEKAILNISKAMEQEFSATKQTLEAHQS

SEQ ID NO: 228 - protein, 387 aa, Homo sapiens
HLLAPVFRTLSILTNQSNCWLCEHLDNAEQPELVFVPASASTWWTYSGQWMYERVWYPQAEVQNHSTSSYRKVTWHWEASMEAQGLSFAQVRLLEGNFSLCVENKNGSGPFLGNIPKQYCNQILWFDSTDGTFMPSIDVTNESRNDDDDTSVCLGTRQCSWFAGCTNRTWNSSAVPLIGLPNTQDYKWVDRNSGLTWSGNDTCLYSCQNQTKGLLYQLFRNLFCSYGLTEAHGKWRCADASITNDKGHDGHRTPTWWLTGSNLTLSVNNSGLFFLCGNGVYKGFPPKWSGRCGLGYLVPSLTRYLTLNASQITNLRSFIHKVTPHRCTQGDTDNPPLYCNPKDNSTIRALFPSLGTYDLEKAILNISKAMEQEFSATKQTLEAHQSK

SEQ ID NO: 229 - protein, 388 aa, Homo sapiens
HLLAPVFRTLSILTNQSNCWLCEHLDNAEQPELVFVPASASTWWTYSGQWMYERVWYPQAEVQNHSTSSYRKVTWHWEASMEAQGLSFAQVRLLEGNFSLCVENKNGSGPFLGNIPKQYCNQILWFDSTDGTFMPSIDVTNESRNDDDDTSVCLGTRQCSWFAGCTNRTWNSSAVPLIGLPNTQDYKWVDRNSGLTWSGNDTCLYSCQNQTKGLLYQLFRNLFCSYGLTEAHGKWRCADASITNDKGHDGHRTPTWWLTGSNLTLSVNNSGLFFLCGNGVYKGFPPKWSGRCGLGYLVPSLTRYLTLNASQITNLRSFIHKVTPHRCTQGDTDNPPLYCNPKDNSTIRALFPSLGTYDLEKAILNISKAMEQEFSATKQTLEAHQSKV

SEQ ID NO: 230 - protein, 389 aa, Homo sapiens
HLLAPVFRTLSILTNQSNCWLCEHLDNAEQPELVFVPASASTWWTYSGQWMYERVWYPQAEVQNHSTSSYRKVTWHWEASMEAQGLSFAQVRLLEGNFSLCVENKNGSGPFLGNIPKQYCNQILWFDSTDGTFMPSIDVTNESRNDDDDTSVCLGTRQCSWFAGCTNRTWNSSAVPLIGLPNTQDYKWVDRNSGLTWSGNDTCLYSCQNQTKGLLYQLFRNLFCSYGLTEAHGKWRCADASITNDKGHDGHRTPTWWLTGSNLTLSVNNSGLFFLCGNGVYKGFPPKWSGRCGLGYLVPSLTRYLTLNASQITNLRSFIHKVTPHRCTQGDTDNPPLYCNPKDNSTIRALFPSLGTYDLEKAILNISKAMEQEFSATKQTLEAHQSKVS

SEQ ID NO: 231 - protein, 390 aa, Homo sapiens
HLLAPVFRTLSILTNQSNCWLCEHLDNAEQPELVFVPASASTWWTYSGQWMYERVWYPQAEVQNHSTSSYRKVTWHWEASMEAQGLSFAQVRLLEGNFSLCVENKNGSGPFLGNIPKQYCNQILWFDSTDGTFMPSIDVTNESRNDDDDTSVCLGTRQCSWFAGCTNRTWNSSAVPLIGLPNTQDYKWVDRNSGLTWSGNDTCLYSCQNQTKGLLYQLFRNLFCSYGLTEAHGKWRCADASITNDKGHDGHRTPTWWLTGSNLTLSVNNSGLFFLCGNGVYKGFPPKWSGRCGLGYLVPSLTRYLTLNASQITNLRSFIHKVTPHRCTQGDTDNPPLYCNPKDNSTIRALFPSLGTYDLEKAILNISKAMEQEFSATKQTLEAHQSKVSS

SEQ ID NO: 232 - protein, 391 aa, Homo sapiens
HLLAPVFRTLSILTNQSNCWLCEHLDNAEQPELVFVPASASTWWTYSGQWMYERVWYPQAEVQNHSTSSYRKVTWHWEASMEAQGLSFAQVRLLEGNFSLCVENKNGSGPFLGNIPKQYCNQILWFDSTDGTFMPSIDVTNESRNDDDDTSVCLGTRQCSWFAGCTNRTWNSSAVPLIGLPNTQDYKWVDRNSGLTWSGNDTCLYSCQNQTKGLLYQLFRNLFCSYGLTEAHGKWRCADASITNDKGHDGHRTPTWWLTGSNLTLSVNNSGLFFLCGNGVYKGFPPKWSGRCGLGYLVPSLTRYLTLNASQITNLRSFIHKVTPHRCTQGDTDNPPLYCNPKDNSTIRALFPSLGTYDLEKAILNISKAMEQEFSATKQTLEAHQSKVSSL

SEQ ID NO: 233 - protein, 392 aa, Homo sapiens
HLLAPVFRTLSILTNQSNCWLCEHLDNAEQPELVFVPASASTWWTYSGQWMYERVWYPQAEVQNHSTSSYRKVTWHWEASMEAQGLSFAQVRLLEGNFSLCVENKNGSGPFLGNIPKQYCNQILWFDSTDGTFMPSIDVTNESRNDDDDTSVCLGTRQCSWFAGCTNRTWNSSAVPLIGLPNTQDYKWVDRNSGLTWSGNDTCLYSCQNQTKGLLYQLFRNLFCSYGLTEAHGKWRCADASITNDKGHDGHRTPTWWLTGSNLTLSVNNSGLFFLCGNGVYKGFPPKWSGRCGLGYLVPSLTRYLTLNASQITNLRSFIHKVTPHRCTQGDTDNPPLYCNPKDNSTIRALFPSLGTYDLEKAILNISKAMEQEFSATKQTLEAHQSKVSSLA

SEQ ID NO: 234 - protein, 393 aa, Homo sapiens
HLLAPVFRTLSILTNQSNCWLCEHLDNAEQPELVFVPASASTWWTYSGQWMYERVWYPQAEVQNHSTSSYRKVTWHWEASMEAQGLSFAQVRLLEGNFSLCVENKNGSGPFLGNIPKQYCNQILWFDSTDGTFMPSIDVTNESRNDDDDTSVCLGTRQCSWFAGCTNRTWNSSAVPLIGLPNTQDYKWVDRNSGLTWSGNDTCLYSCQNQTKGLLYQLFRNLFCSYGLTEAHGKWRCADASITNDKGHDGHRTPTWWLTGSNLTLSVNNSGLFFLCGNGVYKGFPPKWSGRCGLGYLVPSLTRYLTLNASQITNLRSFIHKVTPHRCTQGDTDNPPLYCNPKDNSTIRALFPSLGTYDLEKAILNISKAMEQEFSATKQTLEAHQSKVSSLAS

SEQ ID NO: 235 - protein, 394 aa, Homo sapiens
HLLAPVFRTLSILTNQSNCWLCEHLDNAEQPELVFVPASASTWWTYSGQWMYERVWYPQAEVQNHSTSSYRKVTWHWEASMEAQGLSFAQVRLLEGNFSLCVENKNGSGPFLGNIPKQYCNQILWFDSTDGTFMPSIDVTNESRNDDDDTSVCLGTRQCSWFAGCTNRTWNSSAVPLIGLPNTQDYKWVDRNSGLTWSGNDTCLYSCQNQTKGLLYQLFRNLFCSYGLTEAHGKWRCADASITNDKGHDGHRTPTWWLTGSNLTLSVNNSGLFFLCGNGVYKGFPPKWSGRCGLGYLVPSLTRYLTLNASQITNLRSFIHKVTPHRCTQGDTDNPPLYCNPKDNSTIRALFPSLGTYDLEKAILNISKAMEQEFSATKQTLEAHQSKVSSLASA

SEQ ID NO: 236 - protein, 395 aa, Homo sapiens
HLLAPVFRTLSILTNQSNCWLCEHLDNAEQPELVFVPASASTWWTYSGQWMYERVWYPQAEVQNHSTSSYRKVTWHWEASMEAQGLSFAQVRLLEGNFSLCVENKNGSGPFLGNIPKQYCNQILWFDSTDGTFMPSIDVTNESRNDDDDTSVCLGTRQCSWFAGCTNRTWNSSAVPLIGLPNTQDYKWVDRNSGLTWSGNDTCLYSCQNQTKGLLYQLFRNLFCSYGLTEAHGKWRCADASITNDKGHDGHRTPTWWLTGSNLTLSVNNSGLFFLCGNGVYKGFPPKWSGRCGLGYLVPSLTRYLTLNASQITNLRSFIHKVTPHRCTQGDTDNPPLYCNPKDNSTIRALFPSLGTYDLEKAILNISKAMEQEFSATKQTLEAHQSKVSSLASAS

SEQ ID NO: 237 - protein, 88 aa, Homo sapiens
ATKQTLEAHQSKVSSLASASRKDHVLDIPTTQRQTACGTVGKQCCLYINYSEEIKSNIQRLHEASENLKNVPLLDWQGIFAKVGDWFR

SEQ ID NO: 238 - protein, 87 aa, Homo sapiens
TKQTLEAHQSKVSSLASASRKDHVLDIPTTQRQTACGTVGKQCCLYINYSEEIKSNIQRLHEASENLKNVPLLDWQGIFAKVGDWFR

SEQ ID NO: 239 - protein, 86 aa, Homo sapiens
KQTLEAHQSKVSSLASASRKDHVLDIPTTQRQTACGTVGKQCCLYINYSEEIKSNIQRLHEASENLKNVPLLDWQGIFAKVGDWFR

SEQ ID NO: 240 - protein, 85 aa, Homo sapiens
QTLEAHQSKVSSLASASRKDHVLDIPTTQRQTACGTVGKQCCLYINYSEEIKSNIQRLHEASENLKNVPLLDWQGIFAKVGDWFR

SEQ ID NO: 241 - protein, 84 aa, Homo sapiens
TLEAHQSKVSSLASASRKDHVLDIPTTQRQTACGTVGKQCCLYINYSEEIKSNIQRLHEASENLKNVPLLDWQGIFAKVGDWFR

SEQ ID NO: 242 - protein, 83 aa, Homo sapiens
LEAHQSKVSSLASASRKDHVLDIPTTQRQTACGTVGKQCCLYINYSEEIKSNIQRLHEASENLKNVPLLDWQGIFAKVGDWFR

SEQ ID NO: 243 - protein, 82 aa, Homo sapiens
EAHQSKVSSLASASRKDHVLDIPTTQRQTACGTVGKQCCLYINYSEEIKSNIQRLHEASENLKNVPLLDWQGIFAKVGDWFR

SEQ ID NO: 244 - protein, 81 aa, Homo sapiens
AHQSKVSSLASASRKDHVLDIPTTQRQTACGTVGKQCCLYINYSEEIKSNIQRLHEASENLKNVPLLDWQGIFAKVGDWFR

SEQ ID NO: 245 - protein, 80 aa, Homo sapiens
HQSKVSSLASASRKDHVLDIPTTQRQTACGTVGKQCCLYINYSEEIKSNIQRLHEASENLKNVPLLDWQGIFAKVGDWFR

SEQ ID NO: 246 - protein, 79 aa, Homo sapiens
QSKVSSLASASRKDHVLDIPTTQRQTACGTVGKQCCLYINYSEEIKSNIQRLHEASENLKNVPLLDWQGIFAKVGDWFR

SEQ ID NO: 247 - protein, 78 aa, Homo sapiens
SKVSSLASASRKDHVLDIPTTQRQTACGTVGKQCCLYINYSEEIKSNIQRLHEASENLKNVPLLDWQGIFAKVGDWFR

SEQ ID NO: 248 - protein, 77 aa, Homo sapiens
KVSSLASASRKDHVLDIPTTQRQTACGTVGKQCCLYINYSEEIKSNIQRLHEASENLKNVPLLDWQGIFAKVGDWFR

SEQ ID NO: 249 - protein, 76 aa, Homo sapiens
VSSLASASRKDHVLDIPTTQRQTACGTVGKQCCLYINYSEEIKSNIQRLHEASENLKNVPLLDWQGIFAKVGDWFR

SEQ ID NO: 250 - protein, 75 aa, Homo sapiens
SSLASASRKDHVLDIPTTQRQTACGTVGKQCCLYINYSEEIKSNIQRLHEASENLKNVPLLDWQGIFAKVGDWFR

SEQ ID NO: 251 - protein, 74 aa, Homo sapiens
SLASASRKDHVLDIPTTQRQTACGTVGKQCCLYINYSEEIKSNIQRLHEASENLKNVPLLDWQGIFAKVGDWFR

SEQ ID NO: 252 - protein, 73 aa, Homo sapiens
LASASRKDHVLDIPTTQRQTACGTVGKQCCLYINYSEEIKSNIQRLHEASENLKNVPLLDWQGIFAKVGDWFR

SEQ ID NO: 253 - protein, 72 aa, Homo sapiens
ASASRKDHVLDIPTTQRQTACGTVGKQCCLYINYSEEIKSNIQRLHEASENLKNVPLLDWQGIFAKVGDWFR

SEQ ID NO: 254 - protein, 71 aa, Homo sapiens
SASRKDHVLDIPTTQRQTACGTVGKQCCLYINYSEEIKSNIQRLHEASENLKNVPLLDWQGIFAKVGDWFR

SEQ ID NO: 255 - protein, 70 aa, Homo sapiens
ASRKDHVLDIPTTQRQTACGTVGKQCCLYINYSEEIKSNIQRLHEASENLKNVPLLDWQGIFAKVGDWFR

SEQ ID NO: 256 - protein, 69 aa, Homo sapiens
SRKDHVLDIPTTQRQTACGTVGKQCCLYINYSEEIKSNIQRLHEASENLKNVPLLDWQGIFAKVGDWFR

SEQ ID NO: 257 - protein, 68 aa, Homo sapiens
RKDHVLDIPTTQRQTACGTVGKQCCLYINYSEEIKSNIQRLHEASENLKNVPLLDWQGIFAKVGDWFR

SEQ ID NO: 258 - protein, 91 aa, Homo sapiens
ATKQTLEAHQSKVSSLASASRKDHVLDIPTTQRQTACGTVGKQCCLYINYSEEIKSNIQRLHEASENLKNVPLLDWQGIFAKVGDWFRSWG

SEQ ID NO: 259 - protein, 90 aa, Homo sapiens
TKQTLEAHQSKVSSLASASRKDHVLDIPTTQRQTACGTVGKQCCLYINYSEEIKSNIQRLHEASENLKNVPLLDWQGIFAKVGDWFRSWG

SEQ ID NO: 260 - protein, 89 aa, Homo sapiens
KQTLEAHQSKVSSLASASRKDHVLDIPTTQRQTACGTVGKQCCLYINYSEEIKSNIQRLHEASENLKNVPLLDWQGIFAKVGDWFRSWG

SEQ ID NO: 261 - protein, 88 aa, Homo sapiens
QTLEAHQSKVSSLASASRKDHVLDIPTTQRQTACGTVGKQCCLYINYSEEIKSNIQRLHEASENLKNVPLLDWQGIFAKVGDWFRSWG

SEQ ID NO: 262 - protein, 87 aa, Homo sapiens
TLEAHQSKVSSLASASRKDHVLDIPTTQRQTACGTVGKQCCLYINYSEEIKSNIQRLHEASENLKNVPLLDWQGIFAKVGDWFRSWG

SEQ ID NO: 263 - protein, 86 aa, Homo sapiens
LEAHQSKVSSLASASRKDHVLDIPTTQRQTACGTVGKQCCLYINYSEEIKSNIQRLHEASENLKNVPLLDWQGIFAKVGDWFRSWG

SEQ ID NO: 264 - protein, 85 aa, Homo sapiens
EAHQSKVSSLASASRKDHVLDIPTTQRQTACGTVGKQCCLYINYSEEIKSNIQRLHEASENLKNVPLLDWQGIFAKVGDWFRSWG

SEQ ID NO: 265 - protein, 84 aa, Homo sapiens
AHQSKVSSLASASRKDHVLDIPTTQRQTACGTVGKQCCLYINYSEEIKSNIQRLHEASENLKNVPLLDWQGIFAKVGDWFRSWG

SEQ ID NO: 266 - protein, 83 aa, Homo sapiens
HQSKVSSLASASRKDHVLDIPTTQRQTACGTVGKQCCLYINYSEEIKSNIQRLHEASENLKNVPLLDWQGIFAKVGDWFRSWG

SEQ ID NO: 267 - protein, 82 aa, Homo sapiens
QSKVSSLASASRKDHVLDIPTTQRQTACGTVGKQCCLYINYSEEIKSNIQRLHEASENLKNVPLLDWQGIFAKVGDWFRSWG

SEQ ID NO: 268 - protein, 81 aa, Homo sapiens
SKVSSLASASRKDHVLDIPTTQRQTACGTVGKQCCLYINYSEEIKSNIQRLHEASENLKNVPLLDWQGIFAKVGDWFRSWG

SEQ ID NO: 269 - protein, 80 aa, Homo sapiens
KVSSLASASRKDHVLDIPTTQRQTACGTVGKQCCLYINYSEEIKSNIQRLHEASENLKNVPLLDWQGIFAKVGDWFRSWG

SEQ ID NO: 270 - protein, 79 aa, Homo sapiens
VSSLASASRKDHVLDIPTTQRQTACGTVGKQCCLYINYSEEIKSNIQRLHEASENLKNVPLLDWQGIFAKVGDWFRSWG

SEQ ID NO: 271 - protein, 78 aa, Homo sapiens
SSLASASRKDHVLDIPTTQRQTACGTVGKQCCLYINYSEEIKSNIQRLHEASENLKNVPLLDWQGIFAKVGDWFRSWG

SEQ ID NO: 272 - protein, 77 aa, Homo sapiens
SLASASRKDHVLDIPTTQRQTACGTVGKQCCLYINYSEEIKSNIQRLHEASENLKNVPLLDWQGIFAKVGDWFRSWG

SEQ ID NO: 273 - protein, 76 aa, Homo sapiens
LASASRKDHVLDIPTTQRQTACGTVGKQCCLYINYSEEIKSNIQRLHEASENLKNVPLLDWQGIFAKVGDWFRSWG

SEQ ID NO: 274 - protein, 75 aa, Homo sapiens
ASASRKDHVLDIPTTQRQTACGTVGKQCCLYINYSEEIKSNIQRLHEASENLKNVPLLDWQGIFAKVGDWFRSWG

SEQ ID NO: 275 - protein, 74 aa, Homo sapiens
SASRKDHVLDIPTTQRQTACGTVGKQCCLYINYSEEIKSNIQRLHEASENLKNVPLLDWQGIFAKVGDWFRSWG

SEQ ID NO: 276 - protein, 73 aa, Homo sapiens
ASRKDHVLDIPTTQRQTACGTVGKQCCLYINYSEEIKSNIQRLHEASENLKNVPLLDWQGIFAKVGDWFRSWG

SEQ ID NO: 277 - protein, 72 aa, Homo sapiens
SRKDHVLDIPTTQRQTACGTVGKQCCLYINYSEEIKSNIQRLHEASENLKNVPLLDWQGIFAKVGDWFRSWG

SEQ ID NO: 278 - protein, 71 aa, Homo sapiens
RKDHVLDIPTTQRQTACGTVGKQCCLYINYSEEIKSNIQRLHEASENLKNVPLLDWQGIFAKVGDWFRSWG

SEQ ID NO: 279 - protein, 86 aa, Homo sapiens
ATKQTLEAHQSKVSSLASASRKDHVLDIPTTQRQTACGTVGKQCCLYINYSEEIKSNIQRLHEASENLKNVPLLDWQGIFAKVGDW

SEQ ID NO: 280 - protein, 85 aa, Homo sapiens
TKQTLEAHQSKVSSLASASRKDHVLDIPTTQRQTACGTVGKQCCLYINYSEEIKSNIQRLHEASENLKNVPLLDWQGIFAKVGDW

SEQ ID NO: 281 - protein, 84 aa, Homo sapiens
KQTLEAHQSKVSSLASASRKDHVLDIPTTQRQTACGTVGKQCCLYINYSEEIKSNIQRLHEASENLKNVPLLDWQGIFAKVGDW

SEQ ID NO: 282 - protein, 83 aa, Homo sapiens
QTLEAHQSKVSSLASASRKDHVLDIPTTQRQTACGTVGKQCCLYINYSEEIKSNIQRLHEASENLKNVPLLDWQGIFAKVGDW

SEQ ID NO: 283 - protein, 82 aa, Homo sapiens
TLEAHQSKVSSLASASRKDHVLDIPTTQRQTACGTVGKQCCLYINYSEEIKSNIQRLHEASENLKNVPLLDWQGIFAKVGDW

SEQ ID NO: 284 - protein, 81 aa, Homo sapiens
LEAHQSKVSSLASASRKDHVLDIPTTQRQTACGTVGKQCCLYINYSEEIKSNIQRLHEASENLKNVPLLDWQGIFAKVGDW

SEQ ID NO: 285 - protein, 80 aa, Homo sapiens
EAHQSKVSSLASASRKDHVLDIPTTQRQTACGTVGKQCCLYINYSEEIKSNIQRLHEASENLKNVPLLDWQGIFAKVGDW

SEQ ID NO: 286 - protein, 79 aa, Homo sapiens
AHQSKVSSLASASRKDHVLDIPTTQRQTACGTVGKQCCLYINYSEEIKSNIQRLHEASENLKNVPLLDWQGIFAKVGDW

SEQ ID NO: 287 - protein, 78 aa, Homo sapiens
HQSKVSSLASASRKDHVLDIPTTQRQTACGTVGKQCCLYINYSEEIKSNIQRLHEASENLKNVPLLDWQGIFAKVGDW

SEQ ID NO: 288 - protein, 77 aa, Homo sapiens
QSKVSSLASASRKDHVLDIPTTQRQTACGTVGKQCCLYINYSEEIKSNIQRLHEASENLKNVPLLDWQGIFAKVGDW

SEQ ID NO: 289 - protein, 76 aa, Homo sapiens
SKVSSLASASRKDHVLDIPTTQRQTACGTVGKQCCLYINYSEEIKSNIQRLHEASENLKNVPLLDWQGIFAKVGDW

SEQ ID NO: 290 - protein, 75 aa, Homo sapiens
KVSSLASASRKDHVLDIPTTQRQTACGTVGKQCCLYINYSEEIKSNIQRLHEASENLKNVPLLDWQGIFAKVGDW

SEQ ID NO: 291 - protein, 74 aa, Homo sapiens
VSSLASASRKDHVLDIPTTQRQTACGTVGKQCCLYINYSEEIKSNIQRLHEASENLKNVPLLDWQGIFAKVGDW

SEQ ID NO: 292 - protein, 73 aa, Homo sapiens
SSLASASRKDHVLDIPTTQRQTACGTVGKQCCLYINYSEEIKSNIQRLHEASENLKNVPLLDWQGIFAKVGDW

SEQ ID NO: 293 - protein, 72 aa, Homo sapiens
SLASASRKDHVLDIPTTQRQTACGTVGKQCCLYINYSEEIKSNIQRLHEASENLKNVPLLDWQGIFAKVGDW

SEQ ID NO: 294 - protein, 71 aa, Homo sapiens
LASASRKDHVLDIPTTQRQTACGTVGKQCCLYINYSEEIKSNIQRLHEASENLKNVPLLDWQGIFAKVGDW

SEQ ID NO: 295 - protein, 70 aa, Homo sapiens
ASASRKDHVLDIPTTQRQTACGTVGKQCCLYINYSEEIKSNIQRLHEASENLKNVPLLDWQGIFAKVGDW

SEQ ID NO: 296 - protein, 69 aa, Homo sapiens
SASRKDHVLDIPTTQRQTACGTVGKQCCLYINYSEEIKSNIQRLHEASENLKNVPLLDWQGIFAKVGDW

SEQ ID NO: 297 - protein, 68 aa, Homo sapiens
ASRKDHVLDIPTTQRQTACGTVGKQCCLYINYSEEIKSNIQRLHEASENLKNVPLLDWQGIFAKVGDW

SEQ ID NO: 298 - protein, 67 aa, Homo sapiens
SRKDHVLDIPTTQRQTACGTVGKQCCLYINYSEEIKSNIQRLHEASENLKNVPLLDWQGIFAKVGDW

SEQ ID NO: 299 - protein, 66 aa, Homo sapiens
RKDHVLDIPTTQRQTACGTVGKQCCLYINYSEEIKSNIQRLHEASENLKNVPLLDWQGIFAKVGDW

SEQ ID NO: 300 - protein, 426 aa, Homo sapiens
QHLLAPVFRTLSILTNQSNCWLCEHLDNAEQPELVFVPASASTWWTYSGQWMYERVWYPQAEVQNHSTSSYRKVTWHWEASMEAQGLSFAQVRLLEGNFSLCVENKNGSGPFLGNIPKQYCNQILWFDSTDGTFMPSIDVTNESRNDDDDTSVCLGTRQCSWFAGCTNRTWNSSAVPLIGLPNTQDYKWVDRNSGLTWSGNDTCLYSCQNQTKGLLYQLFRNLFCSYGLTEAHGKWRCADASITNDKGHDGHRTPTWWLTGSNLTLSVNNSGLFFLCGNGVYKGFPPKWSGRCGLGYLVPSLTRYLTLNASQITNLRSFIHKVTPHRCTQGDTDNPPLYCNPKDNSTIRALFPSLGTYDLEKAILNISKAMEQEFSATKQTLEAHQSKVSSLASASRKDHVLDIPTTQRQTACGTVGKQCCLYINY

SEQ ID NO: 301 - protein, 427 aa, Homo sapiens
QHLLAPVFRTLSILTNQSNCWLCEHLDNAEQPELVFVPASASTWWTYSGQWMYERVWYPQAEVQNHSTSSYRKVTWHWEASMEAQGLSFAQVRLLEGNFSLCVENKNGSGPFLGNIPKQYCNQILWFDSTDGTFMPSIDVTNESRNDDDDTSVCLGTRQCSWFAGCTNRTWNSSAVPLIGLPNTQDYKWVDRNSGLTWSGNDTCLYSCQNQTKGLLYQLFRNLFCSYGLTEAHGKWRCADASITNDKGHDGHRTPTWWLTGSNLTLSVNNSGLFFLCGNGVYKGFPPKWSGRCGLGYLVPSLTRYLTLNASQITNLRSFIHKVTPHRCTQGDTDNPPLYCNPKDNSTIRALFPSLGTYDLEKAILNISKAMEQEFSATKQTLEAHQSKVSSLASASRKDHVLDIPTTQRQTACGTVGKQCCLYINYS

SEQ ID NO: 302 - protein, 428 aa, Homo sapiens
QHLLAPVFRTLSILTNQSNCWLCEHLDNAEQPELVFVPASASTWWTYSGQWMYERVWYPQAEVQNHSTSSYRKVTWHWEASMEAQGLSFAQVRLLEGNFSLCVENKNGSGPFLGNIPKQYCNQILWFDSTDGTFMPSIDVTNESRNDDDDTSVCLGTRQCSWFAGCTNRTWNSSAVPLIGLPNTQDYKWVDRNSGLTWSGNDTCLYSCQNQTKGLLYQLFRNLFCSYGLTEAHGKWRCADASITNDKGHDGHRTPTWWLTGSNLTLSVNNSGLFFLCGNGVYKGFPPKWSGRCGLGYLVPSLTRYLTLNASQITNLRSFIHKVTPHRCTQGDTDNPPLYCNPKDNSTIRALFPSLGTYDLEKAILNISKAMEQEFSATKQTLEAHQSKVSSLASASRKDHVLDIPTTQRQTACGTVGKQCCLYINYSE

SEQ ID NO: 303 - protein, 429 aa, Homo sapiens
QHLLAPVFRTLSILTNQSNCWLCEHLDNAEQPELVFVPASASTWWTYSGQWMYERVWYPQAEVQNHSTSSYRKVTWHWEASMEAQGLSFAQVRLLEGNFSLCVENKNGSGPFLGNIPKQYCNQILWFDSTDGTFMPSIDVTNESRNDDDDTSVCLGTRQCSWFAGCTNRTWNSSAVPLIGLPNTQDYKWVDRNSGLTWSGNDTCLYSCQNQTKGLLYQLFRNLFCSYGLTEAHGKWRCADASITNDKGHDGHRTPTWWLTGSNLTLSVNNSGLFFLCGNGVYKGFPPKWSGRCGLGYLVPSLTRYLTLNASQITNLRSFIHKVTPHRCTQGDTDNPPLYCNPKDNSTIRALFPSLGTYDLEKAILNISKAMEQEFSATKQTLEAHQSKVSSLASASRKDHVLDIPTTQRQTACGTVGKQCCLYINYSEE

SEQ ID NO: 304 - protein, 430 aa, Homo sapiens
QHLLAPVFRTLSILTNQSNCWLCEHLDNAEQPELVFVPASASTWWTYSGQWMYERVWYPQAEVQNHSTSSYRKVTWHWEASMEAQGLSFAQVRLLEGNFSLCVENKNGSGPFLGNIPKQYCNQILWFDSTDGTFMPSIDVTNESRNDDDDTSVCLGTRQCSWFAGCTNRTWNSSAVPLIGLPNTQDYKWVDRNSGLTWSGNDTCLYSCQNQTKGLLYQLFRNLFCSYGLTEAHGKWRCADASITNDKGHDGHRTPTWWLTGSNLTLSVNNSGLFFLCGNGVYKGFPPKWSGRCGLGYLVPSLTRYLTLNASQITNLRSFIHKVTPHRCTQGDTDNPPLYCNPKDNSTIRALFPSLGTYDLEKAILNISKAMEQEFSATKQTLEAHQSKVSSLASASRKDHVLDIPTTQRQTACGTVGKQCCLYINYSEEI

SEQ ID NO: 305 - protein, 431 aa, Homo sapiens
QHLLAPVFRTLSILTNQSNCWLCEHLDNAEQPELVFVPASASTWWTYSGQWMYERVWYPQAEVQNHSTSSYRKVTWHWEASMEAQGLSFAQVRLLEGNFSLCVENKNGSGPFLGNIPKQYCNQILWFDSTDGTFMPSIDVTNESRNDDDDTSVCLGTRQCSWFAGCTNRTWNSSAVPLIGLPNTQDYKWVDRNSGLTWSGNDTCLYSCQNQTKGLLYQLFRNLFCSYGLTEAHGKWRCADASITNDKGHDGHRTPTWWLTGSNLTLSVNNSGLFFLCGNGVYKGFPPKWSGRCGLGYLVPSLTRYLTLNASQITNLRSFIHKVTPHRCTQGDTDNPPLYCNPKDNSTIRALFPSLGTYDLEKAILNISKAMEQEFSATKQTLEAHQSKVSSLASASRKDHVLDIPTTQRQTACGTVGKQCCLYINYSEEIK

SEQ ID NO: 306 - protein, 432 aa, Homo sapiens
QHLLAPVFRTLSILTNQSNCWLCEHLDNAEQPELVFVPASASTWWTYSGQWMYERVWYPQAEVQNHSTSSYRKVTWHWEASMEAQGLSFAQVRLLEGNFSLCVENKNGSGPFLGNIPKQYCNQILWFDSTDGTFMPSIDVTNESRNDDDDTSVCLGTRQCSWFAGCTNRTWNSSAVPLIGLPNTQDYKWVDRNSGLTWSGNDTCLYSCQNQTKGLLYQLFRNLFCSYGLTEAHGKWRCADASITNDKGHDGHRTPTWWLTGSNLTLSVNNSGLFFLCGNGVYKGFPPKWSGRCGLGYLVPSLTRYLTLNASQITNLRSFIHKVTPHRCTQGDTDNPPLYCNPKDNSTIRALFPSLGTYDLEKAILNISKAMEQEFSATKQTLEAHQSKVSSLASASRKDHVLDIPTTQRQTACGTVGKQCCLYINYSEEIKS

SEQ ID NO: 307 - protein, 433 aa, Homo sapiens
QHLLAPVFRTLSILTNQSNCWLCEHLDNAEQPELVFVPASASTWWTYSGQWMYERVWYPQAEVQNHSTSSYRKVTWHWEASMEAQGLSFAQVRLLEGNFSLCVENKNGSGPFLGNIPKQYCNQILWFDSTDGTFMPSIDVTNESRNDDDDTSVCLGTRQCSWFAGCTNRTWNSSAVPLIGLPNTQDYKWVDRNSGLTWSGNDTCLYSCQNQTKGLLYQLFRNLFCSYGLTEAHGKWRCADASITNDKGHDGHRTPTWWLTGSNLTLSVNNSGLFFLCGNGVYKGFPPKWSGRCGLGYLVPSLTRYLTLNASQITNLRSFIHKVTPHRCTQGDTDNPPLYCNPKDNSTIRALFPSLGTYDLEKAILNISKAMEQEFSATKQTLEAHQSKVSSLASASRKDHVLDIPTTQRQTACGTVGKQCCLYINYSEEIKSN

SEQ ID NO: 308 - protein, 434 aa, Homo sapiens
QHLLAPVFRTLSILTNQSNCWLCEHLDNAEQPELVFVPASASTWWTYSGQWMYERVWYPQAEVQNHSTSSYRKVTWHWEASMEAQGLSFAQVRLLEGNFSLCVENKNGSGPFLGNIPKQYCNQILWFDSTDGTFMPSIDVTNESRNDDDDTSVCLGTRQCSWFAGCTNRTWNSSAVPLIGLPNTQDYKWVDRNSGLTWSGNDTCLYSCQNQTKGLLYQLFRNLFCSYGLTEAHGKWRCADASITNDKGHDGHRTPTWWLTGSNLTLSVNNSGLFFLCGNGVYKGFPPKWSGRCGLGYLVPSLTRYLTLNASQITNLRSFIHKVTPHRCTQGDTDNPPLYCNPKDNSTIRALFPSLGTYDLEKAILNISKAMEQEFSATKQTLEAHQSKVSSLASASRKDHVLDIPTTQRQTACGTVGKQCCLYINYSEEIKSNI

SEQ ID NO: 309 - protein, 435 aa, Homo sapiens
QHLLAPVFRTLSILTNQSNCWLCEHLDNAEQPELVFVPASASTWWTYSGQWMYERVWYPQAEVQNHSTSSYRKVTWHWEASMEAQGLSFAQVRLLEGNFSLCVENKNGSGPFLGNIPKQYCNQILWFDSTDGTFMPSIDVTNESRNDDDDTSVCLGTRQCSWFAGCTNRTWNSSAVPLIGLPNTQDYKWVDRNSGLTWSGNDTCLYSCQNQTKGLLYQLFRNLFCSYGLTEAHGKWRCADASITNDKGHDGHRTPTWWLTGSNLTLSVNNSGLFFLCGNGVYKGFPPKWSGRCGLGYLVPSLTRYLTLNASQITNLRSFIHKVTPHRCTQGDTDNPPLYCNPKDNSTIRALFPSLGTYDLEKAILNISKAMEQEFSATKQTLEAHQSKVSSLASASRKDHVLDIPTTQRQTACGTVGKQCCLYINYSEEIKSNIQ

SEQ ID NO: 310 - protein, 436 aa, Homo sapiens
QHLLAPVFRTLSILTNQSNCWLCEHLDNAEQPELVFVPASASTWWTYSGQWMYERVWYPQAEVQNHSTSSYRKVTWHWEASMEAQGLSFAQVRLLEGNFSLCVENKNGSGPFLGNIPKQYCNQILWFDSTDGTFMPSIDVTNESRNDDDDTSVCLGTRQCSWFAGCTNRTWNSSAVPLIGLPNTQDYKWVDRNSGLTWSGNDTCLYSCQNQTKGLLYQLFRNLFCSYGLTEAHGKWRCADASITNDKGHDGHRTPTWWLTGSNLTLSVNNSGLFFLCGNGVYKGFPPKWSGRCGLGYLVPSLTRYLTLNASQITNLRSFIHKVTPHRCTQGDTDNPPLYCNPKDNSTIRALFPSLGTYDLEKAILNISKAMEQEFSATKQTLEAHQSKVSSLASASRKDHVLDIPTTQRQTACGTVGKQCCLYINYSEEIKSNIQR

SEQ ID NO: 311 - protein, 437 aa, Homo sapiens
QHLLAPVFRTLSILTNQSNCWLCEHLDNAEQPELVFVPASASTWWTYSGQWMYERVWYPQAEVQNHSTSSYRKVTWHWEASMEAQGLSFAQVRLLEGNFSLCVENKNGSGPFLGNIPKQYCNQILWFDSTDGTFMPSIDVTNESRNDDDDTSVCLGTRQCSWFAGCTNRTWNSSAVPLIGLPNTQDYKWVDRNSGLTWSGNDTCLYSCQNQTKGLLYQLFRNLFCSYGLTEAHGKWRCADASITNDKGHDGHRTPTWWLTGSNLTLSVNNSGLFFLCGNGVYKGFPPKWSGRCGLGYLVPSLTRYLTLNASQITNLRSFIHKVTPHRCTQGDTDNPPLYCNPKDNSTIRALFPSLGTYDLEKAILNISKAMEQEFSATKQTLEAHQSKVSSLASASRKDHVLDIPTTQRQTACGTVGKQCCLYINYSEEIKSNIQRL

SEQ ID NO: 312 - protein, 438 aa, Homo sapiens
QHLLAPVFRTLSILTNQSNCWLCEHLDNAEQPELVFVPASASTWWTYSGQWMYERVWYPQAEVQNHSTSSYRKVTWHWEASMEAQGLSFAQVRLLEGNFSLCVENKNGSGPFLGNIPKQYCNQILWFDSTDGTFMPSIDVTNESRNDDDDTSVCLGTRQCSWFAGCTNRTWNSSAVPLIGLPNTQDYKWVDRNSGLTWSGNDTCLYSCQNQTKGLLYQLFRNLFCSYGLTEAHGKWRCADASITNDKGHDGHRTPTWWLTGSNLTLSVNNSGLFFLCGNGVYKGFPPKWSGRCGLGYLVPSLTRYLTLNASQITNLRSFIHKVTPHRCTQGDTDNPPLYCNPKDNSTIRALFPSLGTYDLEKAILNISKAMEQEFSATKQTLEAHQSKVSSLASASRKDHVLDIPTTQRQTACGTVGKQCCLYINYSEEIKSNIQRLH

SEQ ID NO: 313 - protein, 439 aa, Homo sapiens
QHLLAPVFRTLSILTNQSNCWLCEHLDNAEQPELVFVPASASTWWTYSGQWMYERVWYPQAEVQNHSTSSYRKVTWHWEASMEAQGLSFAQVRLLEGNFSLCVENKNGSGPFLGNIPKQYCNQILWFDSTDGTFMPSIDVTNESRNDDDDTSVCLGTRQCSWFAGCTNRTWNSSAVPLIGLPNTQDYKWVDRNSGLTWSGNDTCLYSCQNQTKGLLYQLFRNLFCSYGLTEAHGKWRCADASITNDKGHDGHRTPTWWLTGSNLTLSVNNSGLFFLCGNGVYKGFPPKWSGRCGLGYLVPSLTRYLTLNASQITNLRSFIHKVTPHRCTQGDTDNPPLYCNPKDNSTIRALFPSLGTYDLEKAILNISKAMEQEFSATKQTLEAHQSKVSSLASASRKDHVLDIPTTQRQTACGTVGKQCCLYINYSEEIKSNIQRLHE

SEQ ID NO: 314 - protein, 440 aa, Homo sapiens
QHLLAPVFRTLSILTNQSNCWLCEHLDNAEQPELVFVPASASTWWTYSGQWMYERVWYPQAEVQNHSTSSYRKVTWHWEASMEAQGLSFAQVRLLEGNFSLCVENKNGSGPFLGNIPKQYCNQILWFDSTDGTFMPSIDVTNESRNDDDDTSVCLGTRQCSWFAGCTNRTWNSSAVPLIGLPNTQDYKWVDRNSGLTWSGNDTCLYSCQNQTKGLLYQLFRNLFCSYGLTEAHGKWRCADASITNDKGHDGHRTPTWWLTGSNLTLSVNNSGLFFLCGNGVYKGFPPKWSGRCGLGYLVPSLTRYLTLNASQITNLRSFIHKVTPHRCTQGDTDNPPLYCNPKDNSTIRALFPSLGTYDLEKAILNISKAMEQEFSATKQTLEAHQSKVSSLASASRKDHVLDIPTTQRQTACGTVGKQCCLYINYSEEIKSNIQRLHEA

SEQ ID NO: 315 - protein, 441 aa, Homo sapiens
QHLLAPVFRTLSILTNQSNCWLCEHLDNAEQPELVFVPASASTWWTYSGQWMYERVWYPQAEVQNHSTSSYRKVTWHWEASMEAQGLSFAQVRLLEGNFSLCVENKNGSGPFLGNIPKQYCNQILWFDSTDGTFMPSIDVTNESRNDDDDTSVCLGTRQCSWFAGCTNRTWNSSAVPLIGLPNTQDYKWVDRNSGLTWSGNDTCLYSCQNQTKGLLYQLFRNLFCSYGLTEAHGKWRCADASITNDKGHDGHRTPTWWLTGSNLTLSVNNSGLFFLCGNGVYKGFPPKWSGRCGLGYLVPSLTRYLTLNASQITNLRSFIHKVTPHRCTQGDTDNPPLYCNPKDNSTIRALFPSLGTYDLEKAILNISKAMEQEFSATKQTLEAHQSKVSSLASASRKDHVLDIPTTQRQTACGTVGKQCCLYINYSEEIKSNIQRLHEAS

SEQ ID NO: 316 - protein, 442 aa, Homo sapiens
QHLLAPVFRTLSILTNQSNCWLCEHLDNAEQPELVFVPASASTWWTYSGQWMYERVWYPQAEVQNHSTSSYRKVTWHWEASMEAQGLSFAQVRLLEGNFSLCVENKNGSGPFLGNIPKQYCNQILWFDSTDGTFMPSIDVTNESRNDDDDTSVCLGTRQCSWFAGCTNRTWNSSAVPLIGLPNTQDYKWVDRNSGLTWSGNDTCLYSCQNQTKGLLYQLFRNLFCSYGLTEAHGKWRCADASITNDKGHDGHRTPTWWLTGSNLTLSVNNSGLFFLCGNGVYKGFPPKWSGRCGLGYLVPSLTRYLTLNASQITNLRSFIHKVTPHRCTQGDTDNPPLYCNPKDNSTIRALFPSLGTYDLEKAILNISKAMEQEFSATKQTLEAHQSKVSSLASASRKDHVLDIPTTQRQTACGTVGKQCCLYINYSEEIKSNIQRLHEASE

SEQ ID NO: 317 - protein, 443 aa, Homo sapiens
QHLLAPVFRTLSILTNQSNCWLCEHLDNAEQPELVFVPASASTWWTYSGQWMYERVWYPQAEVQNHSTSSYRKVTWHWEASMEAQGLSFAQVRLLEGNFSLCVENKNGSGPFLGNIPKQYCNQILWFDSTDGTFMPSIDVTNESRNDDDDTSVCLGTRQCSWFAGCTNRTWNSSAVPLIGLPNTQDYKWVDRNSGLTWSGNDTCLYSCQNQTKGLLYQLFRNLFCSYGLTEAHGKWRCADASITNDKGHDGHRTPTWWLTGSNLTLSVNNSGLFFLCGNGVYKGFPPKWSGRCGLGYLVPSLTRYLTLNASQITNLRSFIHKVTPHRCTQGDTDNPPLYCNPKDNSTIRALFPSLGTYDLEKAILNISKAMEQEFSATKQTLEAHQSKVSSLASASRKDHVLDIPTTQRQTACGTVGKQCCLYINYSEEIKSNIQRLHEASEN

SEQ ID NO: 318 - protein, 444 aa, Homo sapiens
QHLLAPVFRTLSILTNQSNCWLCEHLDNAEQPELVFVPASASTWWTYSGQWMYERVWYPQAEVQNHSTSSYRKVTWHWEASMEAQGLSFAQVRLLEGNFSLCVENKNGSGPFLGNIPKQYCNQILWFDSTDGTFMPSIDVTNESRNDDDDTSVCLGTRQCSWFAGCTNRTWNSSAVPLIGLPNTQDYKWVDRNSGLTWSGNDTCLYSCQNQTKGLLYQLFRNLFCSYGLTEAHGKWRCADASITNDKGHDGHRTPTWWLTGSNLTLSVNNSGLFFLCGNGVYKGFPPKWSGRCGLGYLVPSLTRYLTLNASQITNLRSFIHKVTPHRCTQGDTDNPPLYCNPKDNSTIRALFPSLGTYDLEKAILNISKAMEQEFSATKQTLEAHQSKVSSLASASRKDHVLDIPTTQRQTACGTVGKQCCLYINYSEEIKSNIQRLHEASENL

SEQ ID NO: 319 - protein, 445 aa, Homo sapiens
QHLLAPVFRTLSILTNQSNCWLCEHLDNAEQPELVFVPASASTWWTYSGQWMYERVWYPQAEVQNHSTSSYRKVTWHWEASMEAQGLSFAQVRLLEGNFSLCVENKNGSGPFLGNIPKQYCNQILWFDSTDGTFMPSIDVTNESRNDDDDTSVCLGTRQCSWFAGCTNRTWNSSAVPLIGLPNTQDYKWVDRNSGLTWSGNDTCLYSCQNQTKGLLYQLFRNLFCSYGLTEAHGKWRCADASITNDKGHDGHRTPTWWLTGSNLTLSVNNSGLFFLCGNGVYKGFPPKWSGRCGLGYLVPSLTRYLTLNASQITNLRSFIHKVTPHRCTQGDTDNPPLYCNPKDNSTIRALFPSLGTYDLEKAILNISKAMEQEFSATKQTLEAHQSKVSSLASASRKDHVLDIPTTQRQTACGTVGKQCCLYINYSEEIKSNIQRLHEASENLK

SEQ ID NO: 320 - protein, 446 aa, Homo sapiens
QHLLAPVFRTLSILTNQSNCWLCEHLDNAEQPELVFVPASASTWWTYSGQWMYERVWYPQAEVQNHSTSSYRKVTWHWEASMEAQGLSFAQVRLLEGNFSLCVENKNGSGPFLGNIPKQYCNQILWFDSTDGTFMPSIDVTNESRNDDDDTSVCLGTRQCSWFAGCTNRTWNSSAVPLIGLPNTQDYKWVDRNSGLTWSGNDTCLYSCQNQTKGLLYQLFRNLFCSYGLTEAHGKWRCADASITNDKGHDGHRTPTWWLTGSNLTLSVNNSGLFFLCGNGVYKGFPPKWSGRCGLGYLVPSLTRYLTLNASQITNLRSFIHKVTPHRCTQGDTDNPPLYCNPKDNSTIRALFPSLGTYDLEKAILNISKAMEQEFSATKQTLEAHQSKVSSLASASRKDHVLDIPTTQRQTACGTVGKQCCLYINYSEEIKSNIQRLHEASENLKN

SEQ ID NO: 321 - protein, 425 aa, Homo sapiens
HLLAPVFRTLSILTNQSNCWLCEHLDNAEQPELVFVPASASTWWTYSGQWMYERVWYPQAEVQNHSTSSYRKVTWHWEASMEAQGLSFAQVRLLEGNFSLCVENKNGSGPFLGNIPKQYCNQILWFDSTDGTFMPSIDVTNESRNDDDDTSVCLGTRQCSWFAGCTNRTWNSSAVPLIGLPNTQDYKWVDRNSGLTWSGNDTCLYSCQNQTKGLLYQLFRNLFCSYGLTEAHGKWRCADASITNDKGHDGHRTPTWWLTGSNLTLSVNNSGLFFLCGNGVYKGFPPKWSGRCGLGYLVPSLTRYLTLNASQITNLRSFIHKVTPHRCTQGDTDNPPLYCNPKDNSTIRALFPSLGTYDLEKAILNISKAMEQEFSATKQTLEAHQSKVSSLASASRKDHVLDIPTTQRQTACGTVGKQCCLYINY

SEQ ID NO: 322 - protein, 426 aa, Homo sapiens
HLLAPVFRTLSILTNQSNCWLCEHLDNAEQPELVFVPASASTWWTYSGQWMYERVWYPQAEVQNHSTSSYRKVTWHWEASMEAQGLSFAQVRLLEGNFSLCVENKNGSGPFLGNIPKQYCNQILWFDSTDGTFMPSIDVTNESRNDDDDTSVCLGTRQCSWFAGCTNRTWNSSAVPLIGLPNTQDYKWVDRNSGLTWSGNDTCLYSCQNQTKGLLYQLFRNLFCSYGLTEAHGKWRCADASITNDKGHDGHRTPTWWLTGSNLTLSVNNSGLFFLCGNGVYKGFPPKWSGRCGLGYLVPSLTRYLTLNASQITNLRSFIHKVTPHRCTQGDTDNPPLYCNPKDNSTIRALFPSLGTYDLEKAILNISKAMEQEFSATKQTLEAHQSKVSSLASASRKDHVLDIPTTQRQTACGTVGKQCCLYINYS

SEQ ID NO: 323 - protein, 427 aa, Homo sapiens
HLLAPVFRTLSILTNQSNCWLCEHLDNAEQPELVFVPASASTWWTYSGQWMYERVWYPQAEVQNHSTSSYRKVTWHWEASMEAQGLSFAQVRLLEGNFSLCVENKNGSGPFLGNIPKQYCNQILWFDSTDGTFMPSIDVTNESRNDDDDTSVCLGTRQCSWFAGCTNRTWNSSAVPLIGLPNTQDYKWVDRNSGLTWSGNDTCLYSCQNQTKGLLYQLFRNLFCSYGLTEAHGKWRCADASITNDKGHDGHRTPTWWLTGSNLTLSVNNSGLFFLCGNGVYKGFPPKWSGRCGLGYLVPSLTRYLTLNASQITNLRSFIHKVTPHRCTQGDTDNPPLYCNPKDNSTIRALFPSLGTYDLEKAILNISKAMEQEFSATKQTLEAHQSKVSSLASASRKDHVLDIPTTQRQTACGTVGKQCCLYINYSE

SEQ ID NO: 324 - protein, 428 aa, Homo sapiens
HLLAPVFRTLSILTNQSNCWLCEHLDNAEQPELVFVPASASTWWTYSGQWMYERVWYPQAEVQNHSTSSYRKVTWHWEASMEAQGLSFAQVRLLEGNFSLCVENKNGSGPFLGNIPKQYCNQILWFDSTDGTFMPSIDVTNESRNDDDDTSVCLGTRQCSWFAGCTNRTWNSSAVPLIGLPNTQDYKWVDRNSGLTWSGNDTCLYSCQNQTKGLLYQLFRNLFCSYGLTEAHGKWRCADASITNDKGHDGHRTPTWWLTGSNLTLSVNNSGLFFLCGNGVYKGFPPKWSGRCGLGYLVPSLTRYLTLNASQITNLRSFIHKVTPHRCTQGDTDNPPLYCNPKDNSTIRALFPSLGTYDLEKAILNISKAMEQEFSATKQTLEAHQSKVSSLASASRKDHVLDIPTTQRQTACGTVGKQCCLYINYSEE

SEQ ID NO: 325 - protein, 429 aa, Homo sapiens
HLLAPVFRTLSILTNQSNCWLCEHLDNAEQPELVFVPASASTWWTYSGQWMYERVWYPQAEVQNHSTSSYRKVTWHWEASMEAQGLSFAQVRLLEGNFSLCVENKNGSGPFLGNIPKQYCNQILWFDSTDGTFMPSIDVTNESRNDDDDTSVCLGTRQCSWFAGCTNRTWNSSAVPLIGLPNTQDYKWVDRNSGLTWSGNDTCLYSCQNQTKGLLYQLFRNLFCSYGLTEAHGKWRCADASITNDKGHDGHRTPTWWLTGSNLTLSVNNSGLFFLCGNGVYKGFPPKWSGRCGLGYLVPSLTRYLTLNASQITNLRSFIHKVTPHRCTQGDTDNPPLYCNPKDNSTIRALFPSLGTYDLEKAILNISKAMEQEFSATKQTLEAHQSKVSSLASASRKDHVLDIPTTQRQTACGTVGKQCCLYINYSEEI

SEQ ID NO: 326 - protein, 430 aa, Homo sapiens
HLLAPVFRTLSILTNQSNCWLCEHLDNAEQPELVFVPASASTWWTYSGQWMYERVWYPQAEVQNHSTSSYRKVTWHWEASMEAQGLSFAQVRLLEGNFSLCVENKNGSGPFLGNIPKQYCNQILWFDSTDGTFMPSIDVTNESRNDDDDTSVCLGTRQCSWFAGCTNRTWNSSAVPLIGLPNTQDYKWVDRNSGLTWSGNDTCLYSCQNQTKGLLYQLFRNLFCSYGLTEAHGKWRCADASITNDKGHDGHRTPTWWLTGSNLTLSVNNSGLFFLCGNGVYKGFPPKWSGRCGLGYLVPSLTRYLTLNASQITNLRSFIHKVTPHRCTQGDTDNPPLYCNPKDNSTIRALFPSLGTYDLEKAILNISKAMEQEFSATKQTLEAHQSKVSSLASASRKDHVLDIPTTQRQTACGTVGKQCCLYINYSEEIK

SEQ ID NO: 327 - protein, 431 aa, Homo sapiens
HLLAPVFRTLSILTNQSNCWLCEHLDNAEQPELVFVPASASTWWTYSGQWMYERVWYPQAEVQNHSTSSYRKVTWHWEASMEAQGLSFAQVRLLEGNFSLCVENKNGSGPFLGNIPKQYCNQILWFDSTDGTFMPSIDVTNESRNDDDDTSVCLGTRQCSWFAGCTNRTWNSSAVPLIGLPNTQDYKWVDRNSGLTWSGNDTCLYSCQNQTKGLLYQLFRNLFCSYGLTEAHGKWRCADASITNDKGHDGHRTPTWWLTGSNLTLSVNNSGLFFLCGNGVYKGFPPKWSGRCGLGYLVPSLTRYLTLNASQITNLRSFIHKVTPHRCTQGDTDNPPLYCNPKDNSTIRALFPSLGTYDLEKAILNISKAMEQEFSATKQTLEAHQSKVSSLASASRKDHVLDIPTTQRQTACGTVGKQCCLYINYSEEIKS

SEQ ID NO: 328 - protein, 432 aa, Homo sapiens
HLLAPVFRTLSILTNQSNCWLCEHLDNAEQPELVFVPASASTWWTYSGQWMYERVWYPQAEVQNHSTSSYRKVTWHWEASMEAQGLSFAQVRLLEGNFSLCVENKNGSGPFLGNIPKQYCNQILWFDSTDGTFMPSIDVTNESRNDDDDTSVCLGTRQCSWFAGCTNRTWNSSAVPLIGLPNTQDYKWVDRNSGLTWSGNDTCLYSCQNQTKGLLYQLFRNLFCSYGLTEAHGKWRCADASITNDKGHDGHRTPTWWLTGSNLTLSVNNSGLFFLCGNGVYKGFPPKWSGRCGLGYLVPSLTRYLTLNASQITNLRSFIHKVTPHRCTQGDTDNPPLYCNPKDNSTIRALFPSLGTYDLEKAILNISKAMEQEFSATKQTLEAHQSKVSSLASASRKDHVLDIPTTQRQTACGTVGKQCCLYINYSEEIKSN

SEQ ID NO: 329 - protein, 433 aa, Homo sapiens
HLLAPVFRTLSILTNQSNCWLCEHLDNAEQPELVFVPASASTWWTYSGQWMYERVWYPQAEVQNHSTSSYRKVTWHWEASMEAQGLSFAQVRLLEGNFSLCVENKNGSGPFLGNIPKQYCNQILWFDSTDGTFMPSIDVTNESRNDDDDTSVCLGTRQCSWFAGCTNRTWNSSAVPLIGLPNTQDYKWVDRNSGLTWSGNDTCLYSCQNQTKGLLYQLFRNLFCSYGLTEAHGKWRCADASITNDKGHDGHRTPTWWLTGSNLTLSVNNSGLFFLCGNGVYKGFPPKWSGRCGLGYLVPSLTRYLTLNASQITNLRSFIHKVTPHRCTQGDTDNPPLYCNPKDNSTIRALFPSLGTYDLEKAILNISKAMEQEFSATKQTLEAHQSKVSSLASASRKDHVLDIPTTQRQTACGTVGKQCCLYINYSEEIKSNI

SEQ ID NO: 330 - protein, 434 aa, Homo sapiens
HLLAPVFRTLSILTNQSNCWLCEHLDNAEQPELVFVPASASTWWTYSGQWMYERVWYPQAEVQNHSTSSYRKVTWHWEASMEAQGLSFAQVRLLEGNFSLCVENKNGSGPFLGNIPKQYCNQILWFDSTDGTFMPSIDVTNESRNDDDDTSVCLGTRQCSWFAGCTNRTWNSSAVPLIGLPNTQDYKWVDRNSGLTWSGNDTCLYSCQNQTKGLLYQLFRNLFCSYGLTEAHGKWRCADASITNDKGHDGHRTPTWWLTGSNLTLSVNNSGLFFLCGNGVYKGFPPKWSGRCGLGYLVPSLTRYLTLNASQITNLRSFIHKVTPHRCTQGDTDNPPLYCNPKDNSTIRALFPSLGTYDLEKAILNISKAMEQEFSATKQTLEAHQSKVSSLASASRKDHVLDIPTTQRQTACGTVGKQCCLYINYSEEIKSNIQ

SEQ ID NO: 331 - protein, 435 aa, Homo sapiens
HLLAPVFRTLSILTNQSNCWLCEHLDNAEQPELVFVPASASTWWTYSGQWMYERVWYPQAEVQNHSTSSYRKVTWHWEASMEAQGLSFAQVRLLEGNFSLCVENKNGSGPFLGNIPKQYCNQILWFDSTDGTFMPSIDVTNESRNDDDDTSVCLGTRQCSWFAGCTNRTWNSSAVPLIGLPNTQDYKWVDRNSGLTWSGNDTCLYSCQNQTKGLLYQLFRNLFCSYGLTEAHGKWRCADASITNDKGHDGHRTPTWWLTGSNLTLSVNNSGLFFLCGNGVYKGFPPKWSGRCGLGYLVPSLTRYLTLNASQITNLRSFIHKVTPHRCTQGDTDNPPLYCNPKDNSTIRALFPSLGTYDLEKAILNISKAMEQEFSATKQTLEAHQSKVSSLASASRKDHVLDIPTTQRQTACGTVGKQCCLYINYSEEIKSNIQR

SEQ ID NO: 332 - protein, 436 aa, Homo sapiens
HLLAPVFRTLSILTNQSNCWLCEHLDNAEQPELVFVPASASTWWTYSGQWMYERVWYPQAEVQNHSTSSYRKVTWHWEASMEAQGLSFAQVRLLEGNFSLCVENKNGSGPFLGNIPKQYCNQILWFDSTDGTFMPSIDVTNESRNDDDDTSVCLGTRQCSWFAGCTNRTWNSSAVPLIGLPNTQDYKWVDRNSGLTWSGNDTCLYSCQNQTKGLLYQLFRNLFCSYGLTEAHGKWRCADASITNDKGHDGHRTPTWWLTGSNLTLSVNNSGLFFLCGNGVYKGFPPKWSGRCGLGYLVPSLTRYLTLNASQITNLRSFIHKVTPHRCTQGDTDNPPLYCNPKDNSTIRALFPSLGTYDLEKAILNISKAMEQEFSATKQTLEAHQSKVSSLASASRKDHVLDIPTTQRQTACGTVGKQCCLYINYSEEIKSNIQRL

SEQ ID NO: 333 - protein, 437 aa, Homo sapiens
HLLAPVFRTLSILTNQSNCWLCEHLDNAEQPELVFVPASASTWWTYSGQWMYERVWYPQAEVQNHSTSSYRKVTWHWEASMEAQGLSFAQVRLLEGNFSLCVENKNGSGPFLGNIPKQYCNQILWFDSTDGTFMPSIDVTNESRNDDDDTSVCLGTRQCSWFAGCTNRTWNSSAVPLIGLPNTQDYKWVDRNSGLTWSGNDTCLYSCQNQTKGLLYQLFRNLFCSYGLTEAHGKWRCADASITNDKGHDGHRTPTWWLTGSNLTLSVNNSGLFFLCGNGVYKGFPPKWSGRCGLGYLVPSLTRYLTLNASQITNLRSFIHKVTPHRCTQGDTDNPPLYCNPKDNSTIRALFPSLGTYDLEKAILNISKAMEQEFSATKQTLEAHQSKVSSLASASRKDHVLDIPTTQRQTACGTVGKQCCLYINYSEEIKSNIQRLH

SEQ ID NO: 334 - protein, 438 aa, Homo sapiens
HLLAPVFRTLSILTNQSNCWLCEHLDNAEQPELVFVPASASTWWTYSGQWMYERVWYPQAEVQNHSTSSYRKVTWHWEASMEAQGLSFAQVRLLEGNFSLCVENKNGSGPFLGNIPKQYCNQILWFDSTDGTFMPSIDVTNESRNDDDDTSVCLGTRQCSWFAGCTNRTWNSSAVPLIGLPNTQDYKWVDRNSGLTWSGNDTCLYSCQNQTKGLLYQLFRNLFCSYGLTEAHGKWRCADASITNDKGHDGHRTPTWWLTGSNLTLSVNNSGLFFLCGNGVYKGFPPKWSGRCGLGYLVPSLTRYLTLNASQITNLRSFIHKVTPHRCTQGDTDNPPLYCNPKDNSTIRALFPSLGTYDLEKAILNISKAMEQEFSATKQTLEAHQSKVSSLASASRKDHVLDIPTTQRQTACGTVGKQCCLYINYSEEIKSNIQRLHE

SEQ ID NO: 335 - protein, 439 aa, Homo sapiens
HLLAPVFRTLSILTNQSNCWLCEHLDNAEQPELVFVPASASTWWTYSGQWMYERVWYPQAEVQNHSTSSYRKVTWHWEASMEAQGLSFAQVRLLEGNFSLCVENKNGSGPFLGNIPKQYCNQILWFDSTDGTFMPSIDVTNESRNDDDDTSVCLGTRQCSWFAGCTNRTWNSSAVPLIGLPNTQDYKWVDRNSGLTWSGNDTCLYSCQNQTKGLLYQLFRNLFCSYGLTEAHGKWRCADASITNDKGHDGHRTPTWWLTGSNLTLSVNNSGLFFLCGNGVYKGFPPKWSGRCGLGYLVPSLTRYLTLNASQITNLRSFIHKVTPHRCTQGDTDNPPLYCNPKDNSTIRALFPSLGTYDLEKAILNISKAMEQEFSATKQTLEAHQSKVSSLASASRKDHVLDIPTTQRQTACGTVGKQCCLYINYSEEIKSNIQRLHEA

SEQ ID NO: 336 - protein, 440 aa, Homo sapiens
HLLAPVFRTLSILTNQSNCWLCEHLDNAEQPELVFVPASASTWWTYSGQWMYERVWYPQAEVQNHSTSSYRKVTWHWEASMEAQGLSFAQVRLLEGNFSLCVENKNGSGPFLGNIPKQYCNQILWFDSTDGTFMPSIDVTNESRNDDDDTSVCLGTRQCSWFAGCTNRTWNSSAVPLIGLPNTQDYKWVDRNSGLTWSGNDTCLYSCQNQTKGLLYQLFRNLFCSYGLTEAHGKWRCADASITNDKGHDGHRTPTWWLTGSNLTLSVNNSGLFFLCGNGVYKGFPPKWSGRCGLGYLVPSLTRYLTLNASQITNLRSFIHKVTPHRCTQGDTDNPPLYCNPKDNSTIRALFPSLGTYDLEKAILNISKAMEQEFSATKQTLEAHQSKVSSLASASRKDHVLDIPTTQRQTACGTVGKQCCLYINYSEEIKSNIQRLHEAS

SEQ ID NO: 337 - protein, 441 aa, Homo sapiens
HLLAPVFRTLSILTNQSNCWLCEHLDNAEQPELVFVPASASTWWTYSGQWMYERVWYPQAEVQNHSTSSYRKVTWHWEASMEAQGLSFAQVRLLEGNFSLCVENKNGSGPFLGNIPKQYCNQILWFDSTDGTFMPSIDVTNESRNDDDDTSVCLGTRQCSWFAGCTNRTWNSSAVPLIGLPNTQDYKWVDRNSGLTWSGNDTCLYSCQNQTKGLLYQLFRNLFCSYGLTEAHGKWRCADASITNDKGHDGHRTPTWWLTGSNLTLSVNNSGLFFLCGNGVYKGFPPKWSGRCGLGYLVPSLTRYLTLNASQITNLRSFIHKVTPHRCTQGDTDNPPLYCNPKDNSTIRALFPSLGTYDLEKAILNISKAMEQEFSATKQTLEAHQSKVSSLASASRKDHVLDIPTTQRQTACGTVGKQCCLYINYSEEIKSNIQRLHEASE

SEQ ID NO: 338 - protein, 442 aa, Homo sapiens
HLLAPVFRTLSILTNQSNCWLCEHLDNAEQPELVFVPASASTWWTYSGQWMYERVWYPQAEVQNHSTSSYRKVTWHWEASMEAQGLSFAQVRLLEGNFSLCVENKNGSGPFLGNIPKQYCNQILWFDSTDGTFMPSIDVTNESRNDDDDTSVCLGTRQCSWFAGCTNRTWNSSAVPLIGLPNTQDYKWVDRNSGLTWSGNDTCLYSCQNQTKGLLYQLFRNLFCSYGLTEAHGKWRCADASITNDKGHDGHRTPTWWLTGSNLTLSVNNSGLFFLCGNGVYKGFPPKWSGRCGLGYLVPSLTRYLTLNASQITNLRSFIHKVTPHRCTQGDTDNPPLYCNPKDNSTIRALFPSLGTYDLEKAILNISKAMEQEFSATKQTLEAHQSKVSSLASASRKDHVLDIPTTQRQTACGTVGKQCCLYINYSEEIKSNIQRLHEASEN

SEQ ID NO: 339 - protein, 443 aa, Homo sapiens
HLLAPVFRTLSILTNQSNCWLCEHLDNAEQPELVFVPASASTWWTYSGQWMYERVWYPQAEVQNHSTSSYRKVTWHWEASMEAQGLSFAQVRLLEGNFSLCVENKNGSGPFLGNIPKQYCNQILWFDSTDGTFMPSIDVTNESRNDDDDTSVCLGTRQCSWFAGCTNRTWNSSAVPLIGLPNTQDYKWVDRNSGLTWSGNDTCLYSCQNQTKGLLYQLFRNLFCSYGLTEAHGKWRCADASITNDKGHDGHRTPTWWLTGSNLTLSVNNSGLFFLCGNGVYKGFPPKWSGRCGLGYLVPSLTRYLTLNASQITNLRSFIHKVTPHRCTQGDTDNPPLYCNPKDNSTIRALFPSLGTYDLEKAILNISKAMEQEFSATKQTLEAHQSKVSSLASASRKDHVLDIPTTQRQTACGTVGKQCCLYINYSEEIKSNIQRLHEASENL

SEQ ID NO: 340 - protein, 444 aa, Homo sapiens
HLLAPVFRTLSILTNQSNCWLCEHLDNAEQPELVFVPASASTWWTYSGQWMYERVWYPQAEVQNHSTSSYRKVTWHWEASMEAQGLSFAQVRLLEGNFSLCVENKNGSGPFLGNIPKQYCNQILWFDSTDGTFMPSIDVTNESRNDDDDTSVCLGTRQCSWFAGCTNRTWNSSAVPLIGLPNTQDYKWVDRNSGLTWSGNDTCLYSCQNQTKGLLYQLFRNLFCSYGLTEAHGKWRCADASITNDKGHDGHRTPTWWLTGSNLTLSVNNSGLFFLCGNGVYKGFPPKWSGRCGLGYLVPSLTRYLTLNASQITNLRSFIHKVTPHRCTQGDTDNPPLYCNPKDNSTIRALFPSLGTYDLEKAILNISKAMEQEFSATKQTLEAHQSKVSSLASASRKDHVLDIPTTQRQTACGTVGKQCCLYINYSEEIKSNIQRLHEASENLK

SEQ ID NO: 341 - protein, 445 aa, Homo sapiens
HLLAPVFRTLSILTNQSNCWLCEHLDNAEQPELVFVPASASTWWTYSGQWMYERVWYPQAEVQNHSTSSYRKVTWHWEASMEAQGLSFAQVRLLEGNFSLCVENKNGSGPFLGNIPKQYCNQILWFDSTDGTFMPSIDVTNESRNDDDDTSVCLGTRQCSWFAGCTNRTWNSSAVPLIGLPNTQDYKWVDRNSGLTWSGNDTCLYSCQNQTKGLLYQLFRNLFCSYGLTEAHGKWRCADASITNDKGHDGHRTPTWWLTGSNLTLSVNNSGLFFLCGNGVYKGFPPKWSGRCGLGYLVPSLTRYLTLNASQITNLRSFIHKVTPHRCTQGDTDNPPLYCNPKDNSTIRALFPSLGTYDLEKAILNISKAMEQEFSATKQTLEAHQSKVSSLASASRKDHVLDIPTTQRQTACGTVGKQCCLYINYSEEIKSNIQRLHEASENLKN

SEQ ID NO: 342 - protein, 38 aa, Homo sapiens
SEEIKSNIQRLHEASENLKNVPLLDWQGIFAKVGDWFR

SEQ ID NO: 343 - protein, 37 aa, Homo sapiens
EEIKSNIQRLHEASENLKNVPLLDWQGIFAKVGDWFR

SEQ ID NO: 344 - protein, 36 aa, Homo sapiens
EIKSNIQRLHEASENLKNVPLLDWQGIFAKVGDWFR

SEQ ID NO: 345 - protein, 35 aa, Homo sapiens
IKSNIQRLHEASENLKNVPLLDWQGIFAKVGDWFR

SEQ ID NO: 346 - protein, 34 aa, Homo sapiens
KSNIQRLHEASENLKNVPLLDWQGIFAKVGDWFR

SEQ ID NO: 347 - protein, 33 aa, Homo sapiens
SNIQRLHEASENLKNVPLLDWQGIFAKVGDWFR

SEQ ID NO: 348 - protein, 32 aa, Homo sapiens
NIQRLHEASENLKNVPLLDWQGIFAKVGDWFR

SEQ ID NO: 349 - protein, 31 aa, Homo sapiens
IQRLHEASENLKNVPLLDWQGIFAKVGDWFR

SEQ ID NO: 350 - protein, 30 aa, Homo sapiens
QRLHEASENLKNVPLLDWQGIFAKVGDWFR

SEQ ID NO: 351 - protein, 29 aa, Homo sapiens
RLHEASENLKNVPLLDWQGIFAKVGDWFR

SEQ ID NO: 352 - protein, 28 aa, Homo sapiens
LHEASENLKNVPLLDWQGIFAKVGDWFR

SEQ ID NO: 353 - protein, 27 aa, Homo sapiens
HEASENLKNVPLLDWQGIFAKVGDWFR

SEQ ID NO: 354 - protein, 26 aa, Homo sapiens
EASENLKNVPLLDWQGIFAKVGDWFR

SEQ ID NO: 355 - protein, 25 aa, Homo sapiens
ASENLKNVPLLDWQGIFAKVGDWFR

SEQ ID NO: 356 - protein, 24 aa, Homo sapiens
SENLKNVPLLDWQGIFAKVGDWFR

SEQ ID NO: 357 - protein, 23 aa, Homo sapiens
ENLKNVPLLDWQGIFAKVGDWFR

SEQ ID NO: 358 - protein, 22 aa, Homo sapiens
NLKNVPLLDWQGIFAKVGDWFR

SEQ ID NO: 359 - protein, 21 aa, Homo sapiens
LKNVPLLDWQGIFAKVGDWFR

SEQ ID NO: 360 - protein, 20 aa, Homo sapiens
KNVPLLDWQGIFAKVGDWFR

SEQ ID NO: 361 - protein, 19 aa, Homo sapiens
NVPLLDWQGIFAKVGDWFR

SEQ ID NO: 362 - protein, 18 aa, Homo sapiens
VPLLDWQGIFAKVGDWFR

SEQ ID NO: 363 - protein, 41 aa, Homo sapiens
SEEIKSNIQRLHEASENLKNVPLLDWQGIFAKVGDWFRSWG

SEQ ID NO: 364 - protein, 40 aa, Homo sapiens
EEIKSNIQRLHEASENLKNVPLLDWQGIFAKVGDWFRSWG

SEQ ID NO: 365 - protein, 39 aa, Homo sapiens
EIKSNIQRLHEASENLKNVPLLDWQGIFAKVGDWFRSWG

SEQ ID NO: 366 - protein, 38 aa, Homo sapiens
IKSNIQRLHEASENLKNVPLLDWQGIFAKVGDWFRSWG

SEQ ID NO: 367 - protein, 37 aa, Homo sapiens
KSNIQRLHEASENLKNVPLLDWQGIFAKVGDWFRSWG

SEQ ID NO: 368 - protein, 36 aa, Homo sapiens
SNIQRLHEASENLKNVPLLDWQGIFAKVGDWFRSWG

SEQ ID NO: 369 - protein, 35 aa, Homo sapiens
NIQRLHEASENLKNVPLLDWQGIFAKVGDWFRSWG

SEQ ID NO: 370 - protein, 34 aa, Homo sapiens
IQRLHEASENLKNVPLLDWQGIFAKVGDWFRSWG

SEQ ID NO: 371 - protein, 33 aa, Homo sapiens
QRLHEASENLKNVPLLDWQGIFAKVGDWFRSWG

SEQ ID NO: 372 - protein, 32 aa, Homo sapiens
RLHEASENLKNVPLLDWQGIFAKVGDWFRSWG

SEQ ID NO: 373 - protein, 31 aa, Homo sapiens
LHEASENLKNVPLLDWQGIFAKVGDWFRSWG

SEQ ID NO: 374 - protein, 30 aa, Homo sapiens
HEASENLKNVPLLDWQGIFAKVGDWFRSWG

SEQ ID NO: 375 - protein, 29 aa, Homo sapiens
EASENLKNVPLLDWQGIFAKVGDWFRSWG

SEQ ID NO: 376 - protein, 28 aa, Homo sapiens
ASENLKNVPLLDWQGIFAKVGDWFRSWG

SEQ ID NO: 377 - protein, 27 aa, Homo sapiens
SENLKNVPLLDWQGIFAKVGDWFRSWG

SEQ ID NO: 378 - protein, 26 aa, Homo sapiens
ENLKNVPLLDWQGIFAKVGDWFRSWG

SEQ ID NO: 379 - protein, 25 aa, Homo sapiens
NLKNVPLLDWQGIFAKVGDWFRSWG

SEQ ID NO: 380 - protein, 24 aa, Homo sapiens
LKNVPLLDWQGIFAKVGDWFRSWG

SEQ ID NO: 381 - protein, 23 aa, Homo sapiens
KNVPLLDWQGIFAKVGDWFRSWG

SEQ ID NO: 382 - protein, 22 aa, Homo sapiens
NVPLLDWQGIFAKVGDWFRSWG

SEQ ID NO: 383 - protein, 21 aa, Homo sapiens
VPLLDWQGIFAKVGDWFRSWG

SEQ ID NO: 384 - protein, 36 aa, Homo sapiens
SEEIKSNIQRLHEASENLKNVPLLDWQGIFAKVGDW

SEQ ID NO: 385 - protein, 35 aa, Homo sapiens
EEIKSNIQRLHEASENLKNVPLLDWQGIFAKVGDW

SEQ ID NO: 386 - protein, 34 aa, Homo sapiens
EIKSNIQRLHEASENLKNVPLLDWQGIFAKVGDW

SEQ ID NO: 387 - protein, 33 aa, Homo sapiens
IKSNIQRLHEASENLKNVPLLDWQGIFAKVGDW

SEQ ID NO: 388 - protein, 32 aa, Homo sapiens
KSNIQRLHEASENLKNVPLLDWQGIFAKVGDW

SEQ ID NO: 389 - protein, 31 aa, Homo sapiens
SNIQRLHEASENLKNVPLLDWQGIFAKVGDW

SEQ ID NO: 390 - protein, 30 aa, Homo sapiens
NIQRLHEASENLKNVPLLDWQGIFAKVGDW

SEQ ID NO: 391 - protein, 29 aa, Homo sapiens
IQRLHEASENLKNVPLLDWQGIFAKVGDW

SEQ ID NO: 392 - protein, 28 aa, Homo sapiens
QRLHEASENLKNVPLLDWQGIFAKVGDW

SEQ ID NO: 393 - protein, 27 aa, Homo sapiens
RLHEASENLKNVPLLDWQGIFAKVGDW

SEQ ID NO: 394 - protein, 26 aa, Homo sapiens
LHEASENLKNVPLLDWQGIFAKVGDW

SEQ ID NO: 395 - protein, 25 aa, Homo sapiens
HEASENLKNVPLLDWQGIFAKVGDW

SEQ ID NO: 396 - protein, 24 aa, Homo sapiens
EASENLKNVPLLDWQGIFAKVGDW

SEQ ID NO: 397 - protein, 23 aa, Homo sapiens
ASENLKNVPLLDWQGIFAKVGDW

SEQ ID NO: 398 - protein, 22 aa, Homo sapiens
SENLKNVPLLDWQGIFAKVGDW

SEQ ID NO: 399 - protein, 21 aa, Homo sapiens
ENLKNVPLLDWQGIFAKVGDW

SEQ ID NO: 400 - protein, 25 aa, Homo sapiens
NLKNVPLLDWQGIFAKVGDWFRSWG

SEQ ID NO: 401 - protein, 19 aa, Homo sapiens
LKNVPLLDWQGIFAKVGDW

SEQ ID NO: 402 - protein, 18 aa, Homo sapiens
KNVPLLDWQGIFAKVGDW

SEQ ID NO: 403 - protein, 17 aa, Homo sapiens
NVPLLDWQGIFAKVGDW

SEQ ID NO: 404 - protein, 16 aa, Homo sapiens
VPLLDWQGIFAKVGDW

SEQ ID NO: 405 - protein, 24 aa, Artificial
  generic signal peptide of HEMO protein (Boreoeutheria)
  MISC_FEATURE (2)..(2): G or V or D
  MISC_FEATURE (5)..(5): S or L
  MISC_FEATURE (6)..(6): N or D
  MISC_FEATURE (8)..(8): A or G or V
  MISC_FEATURE (11)..(11): Q or P
  MISC_FEATURE (13)..(13): T or M
  MISC_FEATURE (14)..(14): F or L
  MISC_FEATURE (17)..(17): F or L
  MISC_FEATURE (20)..(20): I or T
  MISC_FEATURE (21)..(21): L or Q or R
  misc_feature (24)..(24): Xaa can be any naturally occurring amino acid
MXSLXXYXLLXLXXTAXLTXXVQX

SEQ ID NO: 406 - protein, 25 aa, Artificial
  generic signal peptide of HEMO protein (Boreoeutheria)
  MISC_FEATURE (2)..(2): G or V or D
  MISC_FEATURE (5)..(5): S or L
  MISC_FEATURE (6)..(6): N or D
  MISC_FEATURE (8)..(8): A or G or V
  MISC_FEATURE (11)..(11): Q or P
  MISC_FEATURE (13)..(13): T or M
  MISC_FEATURE (14)..(14): F or L
  MISC_FEATURE (17)..(17): F or L
  MISC_FEATURE (20)..(20): I or T
  MISC_FEATURE (21)..(21): L or Q or R
  misc_feature (24)..(24): Xaa can be any naturally occurring amino acid
MXSLXXYXLLXLXXTAXLTXXVQXQ

SEQ ID NO: 407 - protein, 24 aa, Artificial
  Generic transmembrane domain of HEMO protein (Boreoeutheria) (end position 512)
  MISC_FEATURE (6)..(6): L or F
  MISC_FEATURE (10)..(10): L or F
  MISC_FEATURE (14)..(14): F or I
  MISC_FEATURE (19)..(19): I or T
  MISC_FEATURE (21)..(21): V or I
  MISC_FEATURE (22)..(22): R or H
  MISC_FEATURE (23)..(23): V or I or F
SWGYVXLIVXFCLXIFVLXYXXXF

SEQ ID NO: 408 - protein, 21 aa, Artificial
  Generic transmembrane domain of HEMO protein (Boreoeutheria) (end position 512)
  MISC_FEATURE (3)..(3): L or F
  MISC_FEATURE (7)..(7): L or F
  MISC_FEATURE (11)..(11): F or I
  MISC_FEATURE (16)..(16): I or T
  MISC_FEATURE (18)..(18): V or I
  MISC_FEATURE (19)..(19): R or H
  MISC_FEATURE (20)..(20): V or I or F
YVXLIVXFCLXIFVLXYXXXF

SEQ ID NO: 409 - protein, 26 aa, Artificial
  Generic transmembrane domain of HEMO protein (Boreoeutheria) (end position 512)
  MISC_FEATURE (8)..(8): L or F
  MISC_FEATURE (12)..(12): L or F
  MISC_FEATURE (16)..(16): F or I
  MISC_FEATURE (21)..(21): I or T
  MISC_FEATURE (23)..(23): V or I
  MISC_FEATURE (24)..(24): R or H
  MISC_FEATURE (25)..(25): V or I or F
FRSWGYVXLIVXFCLXIFVLXYXXXF

SEQ ID NO: 410 - protein, 9 aa, Artificial
  Human HEMO C-X6-CC motif
CGTVGKQCC

SEQ ID NO: 411 - protein, 23 aa, Artificial
  Generic sequence of intracellular domain of HEMO protein (Boreoeutheria) (from HUM to SAK of Fig. 11A-11B)
  MISC_FEATURE (1)..(1): R or G or H
  MISC_FEATURE (4)..(4): R or H
  MISC_FEATURE (7)..(7): L or F
  MISC_FEATURE (11)..(11): P or T
  MISC_FEATURE (13)..(13): N or Y or F
  MISC_FEATURE (14)..(14): L or P
  MISC_FEATURE (15)..(15): A or V
XKSXRSXNSQXLXXXLSPQQSAQ

SEQ ID NO: 412 - protein, 26 aa, Artificial
  Generic sequence of intracellular domain of HEMO protein (Boreoeutheria) (from HUM to SAK of Fig. 11A-11B)
  MISC_FEATURE (1)..(1): R or H
  MISC_FEATURE (2)..(2): V or I or F
  MISC_FEATURE (4)..(4): R or G or H
  MISC_FEATURE (7)..(7): R or H
  MISC_FEATURE (10)..(10): L or F
  MISC_FEATURE (14)..(14): P or T
  MISC_FEATURE (16)..(16): N or Y or F
  MISC_FEATURE (17)..(17): L or P
  MISC_FEATURE (18)..(18): A or V
XXFXKSXRSXNSQXLXXXLSPQQSAQ

SEQ ID NO: 413 - protein, 22 aa, Artificial
  Generic sequence of intracellular domain of HEMO protein (Boreoeutheria) (from HUM to SAK of Fig. 11A-11B)
  MISC_FEATURE (3)..(3): R or H
  MISC_FEATURE (6)..(6): L or F
  MISC_FEATURE (10)..(10): P or T
  MISC_FEATURE (12)..(12): N or Y or F
  MISC_FEATURE (13)..(13): L or P
  MISC_FEATURE (14)..(14): A or V
KSXRSXNSQXLXXXLSPQQSAQ

SEQ ID NO: 414 - protein, 51 aa, Artificial
  Generic sequence of intracellular domain of HEMO protein (Boreoeutheria) (from HUM to RHI of Fig. 11A-11B)
  MISC_FEATURE (1)..(1): R or G or H
  MISC_FEATURE (4)..(4): R or H
  misc_feature (7)..(7): Xaa can be any naturally occurring amino acid
  MISC_FEATURE (11)..(11): P or T
  MISC_FEATURE (13)..(13): N or Y or F
  MISC_FEATURE (14)..(14): L or P
  MISC_FEATURE (15)..(15): A or V
  MISC_FEATURE (24)..(24): L or Q
  MISC_FEATURE (26)..(26): L or I
  MISC_FEATURE (27)..(27): V or N
  MISC_FEATURE (40)..(40): G or E
  MISC_FEATURE (41)..(41): L or P
XKSXRSXNSQXLXXXLSPQQSAQXLXXETSCQVSNRAMKXXTTHQYDTSLL

SEQ ID NO: 415 - protein, 54 aa, Artificial
  Generic sequence of intracellular domain of HEMO protein (Boreoeutheria) (from HUM to RHI of Fig. 11A-11B)
  MISC_FEATURE (1)..(1): R or H
  MISC_FEATURE (2)..(2): V or I or F
  MISC_FEATURE (4)..(4): R or G or H
  MISC_FEATURE (7)..(7): R or H
  MISC_FEATURE (10)..(10): L or F
  MISC_FEATURE (14)..(14): P or T
  MISC_FEATURE (16)..(16): N or Y or F
  MISC_FEATURE (17)..(17): L or P
  MISC_FEATURE (18)..(18): A or V
  MISC_FEATURE (27)..(27): L or Q
  MISC_FEATURE (29)..(29): L or I
  MISC_FEATURE (30)..(30): V or N
  MISC_FEATURE (43)..(43): G or E
  MISC_FEATURE (44)..(44): L or P
XXFXKSXRSXNSQXLXXXLSPQQSAQXLXXETSCQVSNRAMKXXTTHQYDTSLL

SEQ ID NO: 416 - protein, 50 aa, Artificial
  Generic sequence of intracellular domain of HEMO protein (Boreoeutheria) (from HUM to RHI of Fig. 11A-11B)
  MISC_FEATURE (3)..(3): R or H
  MISC_FEATURE (6)..(6): L or F
  MISC_FEATURE (10)..(10): P or T
  MISC_FEATURE (12)..(12): N or Y or F
  MISC_FEATURE (13)..(13): L or P
  MISC_FEATURE (14)..(14): A or V
  MISC_FEATURE (23)..(23): L or Q
  MISC_FEATURE (25)..(25): L or I
  MISC_FEATURE (26)..(26): V or N
  MISC_FEATURE (39)..(39): G or E
  MISC_FEATURE (40)..(40): L or P
KSXRSXNSQXLXXXLSPQQSAQXLXXETSCQVSNRAMKXXTTHQYDTSLL

SEQ ID NO: 417 - protein, 54 aa, Homo sapiens
RVFRKSRRSLNSQPLNLALSPQQSAQLLVSETSCQVSNRAMKGLTTHQYDTSLL

SEQ ID NO: 418 - protein, 50 aa, Homo sapiens
KSRRSLNSQPLNLALSPQQSAQLLVSETSCQVSNRAMKGLTTHQYDTSLL

SEQ ID NO: 419 - protein, 20 aa, Artificial
  Generic transmembrane domain of HEMO protein (Boreoeutheria) (end position 509)
  MISC_FEATURE (5)..(5): L or F
  MISC_FEATURE (9)..(9): L or F
  MISC_FEATURE (13)..(13): F or I
  MISC_FEATURE (18)..(18): I or T
  MISC_FEATURE (20)..(20): V or I
WGYVXLIVXFCLXIFVLXYX

SEQ ID NO: 420 - protein, 21 aa, Artificial
  Generic transmembrane domain of HEMO protein (Boreoeutheria) (end position 509)
  MISC_FEATURE (6)..(6): L or F
  MISC_FEATURE (10)..(10): L or F
  MISC_FEATURE (14)..(14): F or I
  MISC_FEATURE (19)..(19): I or T
  MISC_FEATURE (21)..(21): V or I
SWGYVXLIVXFCLXIFVLXYX

SEQ ID NO: 421 - protein, 18 aa, Artificial
  Generic transmembrane domain of HEMO protein (Boreoeutheria) (end position 509)
  MISC_FEATURE (3)..(3): L or F
  MISC_FEATURE (7)..(7): L or F
  MISC_FEATURE (11)..(11): F or I
  MISC_FEATURE (16)..(16): I or T
  MISC_FEATURE (18)..(18): V or I
YVXLIVXFCLXIFVLXYX

SEQ ID NO: 422 - protein, 23 aa, Artificial
  Generic transmembrane domain of HEMO protein (Boreoeutheria) (end position 509)
  MISC_FEATURE (8)..(8): L or F
  MISC_FEATURE (12)..(12): L or F
  MISC_FEATURE (16)..(16): F or I
  MISC_FEATURE (21)..(21): I or T
  MISC_FEATURE (23)..(23): V or I
FRSWGYVXLIVXFCLXIFVLXYX

SEQ ID NO: 423 - protein, 24 aa, Artificial
  Generic transmembrame domain of HEMO protein (Boreoeutheria) (end position 513)
  MISC_FEATURE (5)..(5): L or F
  MISC_FEATURE (9)..(9): L or F
  MISC_FEATURE (13)..(13): F or I
  MISC_FEATURE (18)..(18): I or T
  MISC_FEATURE (20)..(20): V or I
  MISC_FEATURE (21)..(21): R or H
  MISC_FEATURE (22)..(22): V or I or F
  MISC_FEATURE (24)..(24): R or H
WGYVXLIVXFCLXIFVLXYXXXFX

SEQ ID NO: 424 - protein, 25 aa, Artificial
  Generic transmembrame domain of HEMO protein (Boreoeutheria) (end position 513)
  MISC_FEATURE (6)..(6): L or F
  MISC_FEATURE (10)..(10): L or F
  MISC_FEATURE (14)..(14): F or I
  MISC_FEATURE (19)..(19): I or T
  MISC_FEATURE (21)..(21): V or I
  MISC_FEATURE (22)..(22): R or H
  MISC_FEATURE (23)..(23): V or I or F
  MISC_FEATURE (25)..(25): R or H
SWGYVXLIVXFCLXIFVLXYXXXFX

SEQ ID NO: 425 - protein, 22 aa, Artificial
  Generic transmembrame domain of HEMO protein (Boreoeutheria) (end position 513)
  MISC_FEATURE (3)..(3): L or F
  MISC_FEATURE (7)..(7): L or F
  MISC_FEATURE (11)..(11): F or I
  MISC_FEATURE (16)..(16): I or T
  MISC_FEATURE (18)..(18): V or I
  MISC_FEATURE (19)..(19): R or H
  MISC_FEATURE (20)..(20): V or I or F
  MISC_FEATURE (22)..(22): R or H
YVXLIVXFCLXIFVLXYXXXFX

SEQ ID NO: 426 - protein, 27 aa, Artificial
  Generic transmembrame domain of HEMO protein (Boreoeutheria) (end position 513)
  MISC_FEATURE (8)..(8): L or F
  MISC_FEATURE (12)..(12): L or F
  MISC_FEATURE (16)..(16): F or I
  MISC_FEATURE (21)..(21): I or T
  MISC_FEATURE (23)..(23): V or I
  MISC_FEATURE (24)..(24): R or H
  MISC_FEATURE (25)..(25): V or I or F
  MISC_FEATURE (27)..(27): R or H
FRSWGYVXLIVXFCLXIFVLXYXXXFX

SEQ ID NO: 427 - protein, 24 aa, Homo sapiens
SWGYVLLIVLFCLFIFVLIYVRVF

SEQ ID NO: 428 - protein, 21 aa, Homo sapiens
YVLLIVLFCLFIFVLIYVRVF

SEQ ID NO: 429 - protein, 26 aa, Homo sapiens
FRSWGYVLLIVLFCLFIFVLIYVRVF

SEQ ID NO: 430 - protein, 20 aa, Homo sapiens
WGYVLLIVLFCLFIFVLIYV

SEQ ID NO: 431 - protein, 21 aa, Homo sapiens
SWGYVLLIVLFCLFIFVLIYV

SEQ ID NO: 432 - protein, 18 aa, Homo sapiens
YVLLIVLFCLFIFVLIYV

SEQ ID NO: 433 - protein, 23 aa, Homo sapiens
FRSWGYVLLIVLFCLFIFVLIYV

SEQ ID NO: 434 - protein, 24 aa, Homo sapiens
WGYVLLIVLFCLFIFVLIYVRVFR

SEQ ID NO: 435 - protein, 25 aa, Homo sapiens
SWGYVLLIVLFCLFIFVLIYVRVFR

SEQ ID NO: 436 - protein, 22 aa, Homo sapiens
YVLLIVLFCLFIFVLIYVRVFR

SEQ ID NO: 437 - protein, 27 aa, Homo sapiens
FRSWGYVLLIVLFCLFIFVLIYVRVFR

SEQ ID NO: 438 - protein, 489 aa, Homo sapiens
MGSLSNYALLQLTLTAFLTILVQPQHLLAPVFRTLSILTNQSNCWLCEHLDNAEQPELVFVPASASTWWTYSGQWMYERVWYPQAEVQNHSTSSYRKVTWHWEASMEAQGLSFAQVRLLEGNFSLCVENKNGSGPFLGNIPKQYCNQILWFDSTDGTFMPSIDVTNESRNDDDDTSVCLGTRQCSWFAGCTNRTWNSSAVPLIGLPNTQDYKWVDRNSGLTWSGNDTCLYSCQNQTKGLLYQLFRNLFCSYGLTEAHGKWRCADASITNDKGHDGHRTPTWWLTGSNLTLSVNNSGLFFLCGNGVYKGFPPKWSGRCGLGYLVPSLTRYLTLNASQITNLRSFIHKVTPHRCTQGDTDNPPLYCNPKDNSTIRALFPSLGTYDLEKAILNISKAMEQEFSATKQTLEAHQSKVSSLASASRKDHVLDIPTTQRQTACGTVGKQCCLYINYSEEIKSNIQRLHEASENLKNVPLLDWQGIFAKVGDWFRS

SEQ ID NO: 439 - protein, 488 aa, Homo sapiens
MGSLSNYALLQLTLTAFLTILVQPQHLLAPVFRTLSILTNQSNCWLCEHLDNAEQPELVFVPASASTWWTYSGQWMYERVWYPQAEVQNHSTSSYRKVTWHWEASMEAQGLSFAQVRLLEGNFSLCVENKNGSGPFLGNIPKQYCNQILWFDSTDGTFMPSIDVTNESRNDDDDTSVCLGTRQCSWFAGCTNRTWNSSAVPLIGLPNTQDYKWVDRNSGLTWSGNDTCLYSCQNQTKGLLYQLFRNLFCSYGLTEAHGKWRCADASITNDKGHDGHRTPTWWLTGSNLTLSVNNSGLFFLCGNGVYKGFPPKWSGRCGLGYLVPSLTRYLTLNASQITNLRSFIHKVTPHRCTQGDTDNPPLYCNPKDNSTIRALFPSLGTYDLEKAILNISKAMEQEFSATKQTLEAHQSKVSSLASASRKDHVLDIPTTQRQTACGTVGKQCCLYINYSEEIKSNIQRLHEASENLKNVPLLDWQGIFAKVGDWFR

SEQ ID NO: 440 - protein, 491 aa, Homo sapiens
MGSLSNYALLQLTLTAFLTILVQPQHLLAPVFRTLSILTNQSNCWLCEHLDNAEQPELVFVPASASTWWTYSGQWMYERVWYPQAEVQNHSTSSYRKVTWHWEASMEAQGLSFAQVRLLEGNFSLCVENKNGSGPFLGNIPKQYCNQILWFDSTDGTFMPSIDVTNESRNDDDDTSVCLGTRQCSWFAGCTNRTWNSSAVPLIGLPNTQDYKWVDRNSGLTWSGNDTCLYSCQNQTKGLLYQLFRNLFCSYGLTEAHGKWRCADASITNDKGHDGHRTPTWWLTGSNLTLSVNNSGLFFLCGNGVYKGFPPKWSGRCGLGYLVPSLTRYLTLNASQITNLRSFIHKVTPHRCTQGDTDNPPLYCNPKDNSTIRALFPSLGTYDLEKAILNISKAMEQEFSATKQTLEAHQSKVSSLASASRKDHVLDIPTTQRQTACGTVGKQCCLYINYSEEIKSNIQRLHEASENLKNVPLLDWQGIFAKVGDWFRSWG

SEQ ID NO: 441 - protein, 486 aa, Homo sapiens
MGSLSNYALLQLTLTAFLTILVQPQHLLAPVFRTLSILTNQSNCWLCEHLDNAEQPELVFVPASASTWWTYSGQWMYERVWYPQAEVQNHSTSSYRKVTWHWEASMEAQGLSFAQVRLLEGNFSLCVENKNGSGPFLGNIPKQYCNQILWFDSTDGTFMPSIDVTNESRNDDDDTSVCLGTRQCSWFAGCTNRTWNSSAVPLIGLPNTQDYKWVDRNSGLTWSGNDTCLYSCQNQTKGLLYQLFRNLFCSYGLTEAHGKWRCADASITNDKGHDGHRTPTWWLTGSNLTLSVNNSGLFFLCGNGVYKGFPPKWSGRCGLGYLVPSLTRYLTLNASQITNLRSFIHKVTPHRCTQGDTDNPPLYCNPKDNSTIRALFPSLGTYDLEKAILNISKAMEQEFSATKQTLEAHQSKVSSLASASRKDHVLDIPTTQRQTACGTVGKQCCLYINYSEEIKSNIQRLHEASENLKNVPLLDWQGIFAKVGDW

SEQ ID NO: 442 - protein, 463 aa, Pan troglodytes
LLAPVFRTLSILTNQSNCWLCEHLDNAEQPELVFVPASASTWWTYSGQWMYERMWYPQAEVQNHSTSSYRKVTWHWEASMEAQGLSFAQVRLLEGNFSLCVENKNGSGPFLGNIPKQYCNQILWFDSTDGTFMPSIDVTNESRNDDDDTSVCLGTRQCSWFAGCTNRTWNSSAVPLIGLPNTQDYKWVDRNSGLTWSGNDTCLYSCQNQTKGLLYQLFRNLFCSYGLTEAHGKWRCADANITNDKGHDGHRAPSWWLTGSNLTLSVNNSGLFFLCGNGVYKGFPPKWSGRCGLGYLVPSLTRYLTLNASQITNLRSFIHKVTPHRCTQGDTDNPPLYCNPKDNSTIRALFPSLGTYDLEKAILNISKAMEQEFSATKQTLEAHQSKVSSLASASRKDHVLDIPTTQRQTACGTVGKQCCLYINYSEEIKSNIQRLHEASENLKNVPLLDWQGIFAKVGDWFRS

SEQ ID NO: 443 - protein, 463 aa, Gorilla
LLAPVFRTLSILTNQSNCWLCEHLDNAEQPELVFVPASASTWWTYSGQWMYERVWYPQAEVQNHSTSSYRKVTWHWEASMEAQGLSFAQVRLLEGNFSLCVENKNGSGPFLGNIPKQYCNQILWFDSTDGTFMPSIDVTNESRNDDDDTSVCLGTRQCSWFAGCTNRTWNSSAVPLIGLPNTQDYKWVDRNSGLTWSGNDTCLYSCQNQTKGLLYQLFRNLFCSYGLTEAHGKWRCADANITNDKGHDGHRTPTWWLTGSNLTLSVNNSGLFFLCGNGVYKGFPPKWSGRCGLGYLVPSLTRYLTLNASQITKLRSFIHKVTPHRCTQGDTDNPPLYCNPKDNSTIRALFPSLGTYDLEKAILNISKAMEQEFSATKQTLEAHQSKVSSLASASRKDHVLDIPTTQRQTACGTVGKQCCLYINYSEEIKSNIQRLHEASENLKNVPLLDWQGIFAKVGDWFRS

SEQ ID NO: 444 - protein, 463 aa, Pongo
LLAPVFRTLSILTNQSNCWLCEHLDNAEQPELVFVPSSASTWWTYSGQWMYERVWYPQAEVPNPSTSSYGKVTRHWEASMEAQGLSFAQVRLLEGNFSLCVENKNGTGPFLGNIPKQYCNQILWFDSTDGTFMPSIDVTNESRNDYDDTSVCLGTRQCSWFAGCTNRTWNSSAVPLIGLPNTQDYKWVDRNSGLTWSGNDTCLYSCQNQTKGLLYQLFRNLFCSYGLTEAHGKWRCADANITNDKGHDGHQTPTWWLTGSNLTLSVNNSGLFFLCGNGVYKGFPPKWSGRCGLGYLVPSLTRYLTLNASQITNLRSFIHKVTPHRCTQRDTDDPPLYCNPKDNSTIRALFPSLGTYDLEKAILNISKAMEQEFSATKQTLEAHQSKVSSLASASQKDHVLDIPTTQRQTACGTVGKQCCLYINYSEEIKSNIQRLHEASENLKNIPLLDWEGIFAKVGDWFRS

SEQ ID NO: 445 - protein, 463 aa, Hylobates
LLAPVFRTLSILTNQSNCWLCEHLDNAEQPELVFVPASASTWWTYSGQWVYERVWYPQAEVQNHSTSSYGKVTRHWEASMEAQGLSFAQVRLLEGNLSLCIENKNGTGPFLGNIPKRYCNQILWFDSTDGTFMPSTDVTNESRNDYDDTSVCLGTRQCSWLAGCTNQTWNSSAVPLIGLPNTQDYKWVDRNSGLTWSGNDTCLYSCQNQTKGLLYQLFRNLFCSYGLTEAHGKWRCADVNITNDKGYDGHQTPTWWLTGSNLTLSVNNSGLFFLCGNGVYKGFPPKWSGRCGLGYLVPSLTRYLTLNASQITNLRSFIHKVTPHRCTQRDTDNPPLYCNPKHNSTIRALFPSLGTYDLEKAILNISKAMEQEFSATKQTLEAHQSKVSSLASASRKDHVLDIPTTQRQTACRTVGKQCCLYINHSEEIMSNIQRLREASENLKNVPLLDWEGIFAKVGDWFRS

SEQ ID NO: 446 - protein, 463 aa, Macaca
LLAPVFKTLSILTNQSNCWLCEHLDNAEQPELVFVPASASTWWTHSGQWMYERVWYPQAEVQNHSTSSYGKVTQHWEASMEAQGLSIAQVRLLEGNFSLCVENKNGTGPFLGNIPKQYCNQILWFDFTDGTFMPSIDVTDESRNDYDDTSVCLGTRQCSWFAGCTNQTWNSSAVPLIGLPNTQDYKWVDRNSGLTWSGNGTCLYSCQNQTKGLLYQLFRNLFCSYGLTEAHGKWRCADANITNDKGHDGHQTPTWWLTGSNLTLSVNNSGLFFLCGNGVYKGFPPKWSGRCGLGYLVPSLTRYLTLNASQITNLRSFIHKVTPHRCTQRDTDNPPLYCNPKDNSTIRALFPSLGTYDLEKAILNISKAMEQEISATKQTLEAHQSKVSSLASASQKDHVLDIPTTQRQTACRTVGKQCCLYINNSEAIMSDIQHLYEISENLKNGPFFDWEGLFAKVGDWFRS

SEQ ID NO: 447 - protein, 463 aa, Papio anubis
LLAPVFQTLSILTNQSNCWLCEHLDNAEQPELVFVPASASTWWTYSGQWMYERVWYAQAEVQNHSTSSYGKVTQHWEASMEAQGLSFAQVRLLEGNFSLCVENKNGTGPFLGNIPKQYCNQILWFDFTDGTFMPSIDVTDESRNDYDDTSVCLGTRQCSWFAGCTNQTWNSSAVPLIGLPNTQDYKWVDRNSGLTWSGNGTCLYSCQNQTKGLLYQLFRNLFCSYGLTEAHGKWRCADANITNDKGHDGHQTPTWWLTGSNLTLSVNNSGLFFLCGNGVYKGFPPKWSGRCGLGYLVPSLTRYLTLNASQITNLRSFIHKVTPHRCTQRDTDNPPLYCNPKDNSTIRALFPSLGTYDLEKAILNISKAMEQEISATKQTLEAHQSKVSSLASASQKDHVLDIPTTQRQTACRTVGKQCCLYINNSEAIMSDIQHLYEISENLKNGPFFDWEGLFAKVGDWFRS

SEQ ID NO: 448 - protein, 462 aa, Chlorocebus sabeus
LLAPVFQTLSILTNQSNCWLCEHLDNAEQPELIFVPASASTWWTYSGQWMYERVWYPQAEVQNHSTSSYGKVTRHWEASMEAQGLSFAQVRLLEGNFSLCVENKNGTGPFLGNIPKQYWNQILWFDFTDGTFMPSIDVTDESRNDYDTSVCLGTRQCSWFAGCTNQTWNSSAVPLIGLPNTQDYKWVDRNSGLTWSGNGTCLYSCQNQTKGLLYQLFRNLFCSYGLTEAHGKWRCADANITNDKGHDGHQTPTWWLTGSNLTLSVNNSGLFFLCGNGVYKGFPPKWSGRCGLGYLVPSLTRYLTLNASQITNLRSFIHKVTPHRCTQRDTDNPPLYCNPKDNSTIRALFPSLGTYDLEKAILNISKAMEQEISATKQTLEAHQSKVSSLASASQKDHVLDIPTTQRQTACRTVGKQCCLYINNSEAIMSDIQHLYEISENLKNGPFFDWEGLFAKVGDWFRS

SEQ ID NO: 449 - protein, 463 aa, Colobus angolensis palliatus
LLAPVFRTLSILTNQSNCWLCEHLDNAEQPELVFVPASASTWWTYSGQWMYERVWYPQAEVQNQSTSSYGKATWHWEASMEAQGLSFAQVRLLEGNFSLCVENKNGTGPFLGNIPKQYCNQILWFDFTDGTFMPSIDVTDESRNDYDDTSVCLGTRQCSWFAGCTNQTWNSSAVPLIGLPNTQDYKWVDRNSGLTWSGNGTCLYSCQNQTRGLLYQLFRNLFCSYGLTQAHGKWRCADANITNDKGHDGHQTPTWWLTGSNLTLSVNNSGLFFLCGNGVYKGFPPKWSGRCGLGYLVPSLTRYLTLNASQITNLRSFIHKVTPHRCTQRDTDNPPLYCNPKDNSTIRALFPSLGTYDLEKAILNISKAMEQEISATKQTLEAHQSKVSSLASASQKDHVLDIPTTQRQTACRTVGKQCCLYINNSEAIMSDIQHLYEISENLKNGPLFDWEGLFANVGDWFRS

SEQ ID NO: 450 - protein, 463 aa, Semnopithecus entellus
LLAPVFRTLSILTNQSNCWLCEHLDNAEQPELVFVPASASTWWTYSGQWMYERVWYPQAEVQNHSTSSYGKATWHWEAAMEAQGLSFAQVRLLEGNFSLCVENKNGTGPFLGNIPKQYCNQILWFDFTDGTFMPSIDVTDESRNDYDDTSVCLGTRQCSWFAGCTNQTWNSSAVPLIGLPNTQDYKWVDRNSGLTWSGNGTCLYSCQNQTKGLLYQLFRNLFCSYGLTEAHGKWRCADANITNDKDHDGHQNPTWWLTGSNLTLSVNNSGLFLLCGNGVYKGFPPKWSGRCGLGYLVPSLTRYLTLNASQITNLRSFIHKVTPHRCTQRDTDNSPLYCNPKDNSTVRALFPSLGTYDLEKAILNISKAMEQEISATKQTLEAHQSKVSSLVSASQKDHVLDIPTTQRQTACRTVGKQCCLYINNSEAIMSDIQHLYEISENLKNGPLFDWEGLFAKVGDWFRS

SEQ ID NO: 451 - protein, 462 aa, Rhinopithecus roxellana
LLAPVFRTLSILTNQSNCWLCEHLDNAEQPELVFVPASASTWWTYSGQWMYKRVWYPQAEVQNHSTSSYGKATWHWEAAMEAQGLSFAQVRLLEGNFSLCVENKNGTGPFLGNIPKQYCNQILWFDFTDGTFMPSIDVTDESRNDYDDTSVCLGTRQCSWFAGCTNQTWNSSAVPLIGLPNTQDYKWVDRNSGLTWSGNGTCLYSCQNQTKGLLYQLFRNLFCSYGLTEAHGKWRCADANITNDKGHDGHQTPTWWLTGSNLTLSVNNSGLFLLCGNGVYKGFPPKWSGRCGLGYLVPSLTRYLTLNASQITNLRSFIHKVTPHRCIQRDTDNPPLYCNPKDNSTIRALFPSLGTYLEKAILNISKAMEQEISATKQTLEAHQSKVSSLASASQKDHVLDIPTTQRQTACRTVGKQCCLYINNSEAIMSDIQHLYEISENLKNGPLFDWEGLFAKVGDWFRS

SEQ ID NO: 452 - protein, 456 aa, Marmoset
LLAPVFQTLSILTNQSNCWLCEHLDNAEEPELVFVPASASTWWTSSGRWMYERVWHLQAEVQNHSTSSCDKVTHHWEAFMEAQGLSFAQVRLLEGNFSLCVENKNGTGPFLGNIPKQYCIQTLWFDSTDGTFTPSIDVTEESRNDYDDTSVYLRTRQCPWFVDCTNWTWNSSTIPLIGLPSTQDYQWVDRNSGLTWSGNDTCLYSCQNQTKGLLYQLFRNLFCSYGLQEAHGKWRCADANITNDKGHDGHQTPTWWLTGANLTLSLNNSGLFILCGNGVYKGFPPKWSGRCGLGYLVPSLTRHLTLNTSQITNLRSFIHKVTPRRRTKRDTDSAPLYYNPKDNSTVRALFPSLGTSDLEKAILNLSKAIEQEFGATQPTLEGHQSNVSSLTSASPNDRVLDIPTTQRQTACGTVGKQCCLYINNSEDIMANIQRIKDISKNMKNIPLFDWGDWFTS

SEQ ID NO: 453 - protein, 456 aa, Saimiri
LLAPVFRTLSILTNQSNCWLCEHLDNAEEPELVFVPASASTWWTYSGQWLYERVCHLQAEMQNHSTSSCDKVTQHWEAFMEAQGLSFAQIRLLEGNFSLCVENKNGTGPFLGNIPKQYCTQTLWFDSTDGTFTPSIDITKESRKDYDDTRVYLRTRQRPWFADRINWTWNSSTVPLIGLPSTQNYQWVDRNSGLTWSGNDTCLYSCQNQTKGLLYQLFRNIFCSYGLTEAHGKWRCADANITNDKGHDGHQTPTWWLTGANLTLSVNNSGLFILCGNGVYKGFPPKWSGRCGLGYLVPSLTRYLTLNASQITNLRSFIHKATPHRRTKRDTHNPPLYHNPKDNSTIRALFPSLGTSDLEKAILNLSKAIEQEFGATQPTLEAHQSKGSSLASASPNDRVLDLPTTQRQTACGTVDKQCCLYINNSEDIMSDIQRIKDIAKNMKNIPLFDWGVWFRS

SEQ ID NO: 454 - protein, 446 aa, Ateles
LLAPVFRTLSVLTNQSNCWLCEHLDNAEEPELVFVPASASTWWTHSGQWMYERVWHPQAEVQNHSTSSWDKVTQHWEAFMEAQGLSFAQVKLLEGNFSLCIENKNGTGPFLGNIPKQYCIQTLWFDSTDGTFTPSIDVTKESRNDYDDTSVYLRTNWTWNSSTVPLIGLPGTQDYQWVDRNSGLTWSSNDTCLYSCQNQTKGLLYQLFHNIFCSYGLTEAHGKWGCADANITNDKGHDGHQTPTWWLTGANLTLSVNNSGLFILCGNGVYKGFPPKWSGRCGLGYLVPSLTRYLTLNASQITNLRSFIHKVTLRRRTKRDTDNPPLYYNPKDNSTIKALFPSLGTSDLEKAILNLSKAIDQEFGATQPTLEAHQSKVGSLASASPHDRVLDIPTTQRQTACGTVGKQCCLYINNSEDIMSDIQRIKDISENMKNIPLFDWGDWFIS

SEQ ID NO: 455 - protein, 456 aa, Pithecia
LLAPVFRTLSILTNQSNCWLCEHLDNAEEPELVFVPASASTWWTYSGQWIYQRVWHLQAEVQNHSTSSYDKVTQHWEAFMEAQGLSFAQVRLLEGNFSLCVENKNGTGPFLGNIPKQYCIQTLWFDSTDGTFTPSIDVTKESRNDNDDTSVYLHTRQCPWFADCTNWTWNSSTVPLIGLPSTQDYQWVDRNSGLTWSGNDTCLYSCQNQTKGLLYQLFRNIFCSYGLTEAHGKWRCADANITNDKDQNGHQTPTWWLTVANLTLSVNNSGLFILCGNGVYKGFPPKWSGRCGLGRLVPSLTRYLTLNASQITNLRSFIHKVTPHRRTKRDTDNPPLYYNPKDNSTIRALFPSLGTSDLEKAILNLSKAIEQEFSATQPNLEAHQSKVSSLASASPNDRVLDIPTTQRQTACGTVGKQCCLYINNSEDIMSDIQRIKDISENMKNVPLFDWGDWFRS

SEQ ID NO: 456 - protein, 463 aa, Felis catus
PLPPLFQTLATLANLSDCWLCQHLDNAQEPELVFVPAHASTWWTHSGQWMHKREWYPQTRGHNHSTSSYGRVLWHWETSAEAQGLSLTQVRLLEGNFSVCIENKNGTGPFLGDVPKQYCNQTVWFDSTDGTFRPSIDVANESKTDYYDANVCLVTGQYSWFAGHTTGTWNSSPFPLVGLPNTQDYIWVDQNSGMTWLGNDTYLYSCQNQTKGLLYQIFRNLFCSYRLTEAHGKWRCADANITNDKGHGGHPMPAWWVTRSTLTLSVNNSGLFILCGNKVYKEFPPNWSGRCGLGYLAPSVSQYPAFNGSQITGVGSLIHKVAPHRRTQRDVIDPPPVYHNPNSLRALFSRLGTSDLEEAILNISKATEQGLAATVQTSEARQSRVSSLLSALQNHHLDLSAAQQGRTCTIVGNQCCLYVNKSKEVRFLLNSVKERIDSRRRMRELAFNWTDLVSGVRDWFSGH

SEQ ID NO: 457 - protein, 465 aa, Pan troglodytes
QHLLAPVFRTLSILTNQSNCWLCEHLDNAEQPELVFVPASASTWWTYSGQWMYERMWYPQAEVQNHSTSSYRKVTWHWEASMEAQGLSFAQVRLLEGNFSLCVENKNGSGPFLGNIPKQYCNQILWFDSTDGTFMPSIDVTNESRNDDDDTSVCLGTRQCSWFAGCTNRTWNSSAVPLIGLPNTQDYKWVDRNSGLTWSGNDTCLYSCQNQTKGLLYQLFRNLFCSYGLTEAHGKWRCADANITNDKGHDGHRAPSWWLTGSNLTLSVNNSGLFFLCGNGVYKGFPPKWSGRCGLGYLVPSLTRYLTLNASQITNLRSFIHKVTPHRCTQGDTDNPPLYCNPKDNSTIRALFPSLGTYDLEKAILNISKAMEQEFSATKQTLEAHQSKVSSLASASRKDHVLDIPTTQRQTACGTVGKQCCLYINYSEEIKSNIQRLHEASENLKNVPLLDWQGIFAKVGDWFRS

SEQ ID NO: 458 - protein, 465 aa, Gorilla
QHLLAPVFRTLSILTNQSNCWLCEHLDNAEQPELVFVPASASTWWTYSGQWMYERVWYPQAEVQNHSTSSYRKVTWHWEASMEAQGLSFAQVRLLEGNFSLCVENKNGSGPFLGNIPKQYCNQILWFDSTDGTFMPSIDVTNESRNDDDDTSVCLGTRQCSWFAGCTNRTWNSSAVPLIGLPNTQDYKWVDRNSGLTWSGNDTCLYSCQNQTKGLLYQLFRNLFCSYGLTEAHGKWRCADANITNDKGHDGHRTPTWWLTGSNLTLSVNNSGLFFLCGNGVYKGFPPKWSGRCGLGYLVPSLTRYLTLNASQITKLRSFIHKVTPHRCTQGDTDNPPLYCNPKDNSTIRALFPSLGTYDLEKAILNISKAMEQEFSATKQTLEAHQSKVSSLASASRKDHVLDIPTTQRQTACGTVGKQCCLYINYSEEIKSNIQRLHEASENLKNVPLLDWQGIFAKVGDWFRS

SEQ ID NO: 459 - protein, 465 aa, Pongo
QHLLAPVFRTLSILTNQSNCWLCEHLDNAEQPELVFVPSSASTWWTYSGQWMYERVWYPQAEVPNPSTSSYGKVTRHWEASMEAQGLSFAQVRLLEGNFSLCVENKNGTGPFLGNIPKQYCNQILWFDSTDGTFMPSIDVTNESRNDYDDTSVCLGTRQCSWFAGCTNRTWNSSAVPLIGLPNTQDYKWVDRNSGLTWSGNDTCLYSCQNQTKGLLYQLFRNLFCSYGLTEAHGKWRCADANITNDKGHDGHQTPTWWLTGSNLTLSVNNSGLFFLCGNGVYKGFPPKWSGRCGLGYLVPSLTRYLTLNASQITNLRSFIHKVTPHRCTQRDTDDPPLYCNPKDNSTIRALFPSLGTYDLEKAILNISKAMEQEFSATKQTLEAHQSKVSSLASASQKDHVLDIPTTQRQTACGTVGKQCCLYINYSEEIKSNIQRLHEASENLKNIPLLDWEGIFAKVGDWFRS

SEQ ID NO: 460 - protein, 465 aa, Hylobates
QHLLAPVFRTLSILTNQSNCWLCEHLDNAEQPELVFVPASASTWWTYSGQWVYERVWYPQAEVQNHSTSSYGKVTRHWEASMEAQGLSFAQVRLLEGNLSLCIENKNGTGPFLGNIPKRYCNQILWFDSTDGTFMPSTDVTNESRNDYDDTSVCLGTRQCSWLAGCTNQTWNSSAVPLIGLPNTQDYKWVDRNSGLTWSGNDTCLYSCQNQTKGLLYQLFRNLFCSYGLTEAHGKWRCADVNITNDKGYDGHQTPTWWLTGSNLTLSVNNSGLFFLCGNGVYKGFPPKWSGRCGLGYLVPSLTRYLTLNASQITNLRSFIHKVTPHRCTQRDTDNPPLYCNPKHNSTIRALFPSLGTYDLEKAILNISKAMEQEFSATKQTLEAHQSKVSSLASASRKDHVLDIPTTQRQTACRTVGKQCCLYINHSEEIMSNIQRLREASENLKNVPLLDWEGIFAKVGDWFRS

SEQ ID NO: 461 - protein, 465 aa, Macaca
QHLLAPVFKTLSILTNQSNCWLCEHLDNAEQPELVFVPASASTWWTHSGQWMYERVWYPQAEVQNHSTSSYGKVTQHWEASMEAQGLSIAQVRLLEGNFSLCVENKNGTGPFLGNIPKQYCNQILWFDFTDGTFMPSIDVTDESRNDYDDTSVCLGTRQCSWFAGCTNQTWNSSAVPLIGLPNTQDYKWVDRNSGLTWSGNGTCLYSCQNQTKGLLYQLFRNLFCSYGLTEAHGKWRCADANITNDKGHDGHQTPTWWLTGSNLTLSVNNSGLFFLCGNGVYKGFPPKWSGRCGLGYLVPSLTRYLTLNASQITNLRSFIHKVTPHRCTQRDTDNPPLYCNPKDNSTIRALFPSLGTYDLEKAILNISKAMEQEISATKQTLEAHQSKVSSLASASQKDHVLDIPTTQRQTACRTVGKQCCLYINNSEAIMSDIQHLYEISENLKNGPFFDWEGLFAKVGDWFRS

SEQ ID NO: 462 - protein, 465 aa, Papio anubis
QHLLAPVFQTLSILTNQSNCWLCEHLDNAEQPELVFVPASASTWWTYSGQWMYERVWYAQAEVQNHSTSSYGKVTQHWEASMEAQGLSFAQVRLLEGNFSLCVENKNGTGPFLGNIPKQYCNQILWFDFTDGTFMPSIDVTDESRNDYDDTSVCLGTRQCSWFAGCTNQTWNSSAVPLIGLPNTQDYKWVDRNSGLTWSGNGTCLYSCQNQTKGLLYQLFRNLFCSYGLTEAHGKWRCADANITNDKGHDGHQTPTWWLTGSNLTLSVNNSGLFFLCGNGVYKGFPPKWSGRCGLGYLVPSLTRYLTLNASQITNLRSFIHKVTPHRCTQRDTDNPPLYCNPKDNSTIRALFPSLGTYDLEKAILNISKAMEQEISATKQTLEAHQSKVSSLASASQKDHVLDIPTTQRQTACRTVGKQCCLYINNSEAIMSDIQHLYEISENLKNGPFFDWEGLFAKVGDWFRS

SEQ ID NO: 463 - protein, 464 aa, Chlorocebus sabeus
QHLLAPVFQTLSILTNQSNCWLCEHLDNAEQPELIFVPASASTWWTYSGQWMYERVWYPQAEVQNHSTSSYGKVTRHWEASMEAQGLSFAQVRLLEGNFSLCVENKNGTGPFLGNIPKQYWNQILWFDFTDGTFMPSIDVTDESRNDYDTSVCLGTRQCSWFAGCTNQTWNSSAVPLIGLPNTQDYKWVDRNSGLTWSGNGTCLYSCQNQTKGLLYQLFRNLFCSYGLTEAHGKWRCADANITNDKGHDGHQTPTWWLTGSNLTLSVNNSGLFFLCGNGVYKGFPPKWSGRCGLGYLVPSLTRYLTLNASQITNLRSFIHKVTPHRCTQRDTDNPPLYCNPKDNSTIRALFPSLGTYDLEKAILNISKAMEQEISATKQTLEAHQSKVSSLASASQKDHVLDIPTTQRQTACRTVGKQCCLYINNSEAIMSDIQHLYEISENLKNGPFFDWEGLFAKVGDWFRS

SEQ ID NO: 464 - protein, 465 aa, Colobus angolensis palliatus
QHLLAPVFRTLSILTNQSNCWLCEHLDNAEQPELVFVPASASTWWTYSGQWMYERVWYPQAEVQNQSTSSYGKATWHWEASMEAQGLSFAQVRLLEGNFSLCVENKNGTGPFLGNIPKQYCNQILWFDFTDGTFMPSIDVTDESRNDYDDTSVCLGTRQCSWFAGCTNQTWNSSAVPLIGLPNTQDYKWVDRNSGLTWSGNGTCLYSCQNQTRGLLYQLFRNLFCSYGLTQAHGKWRCADANITNDKGHDGHQTPTWWLTGSNLTLSVNNSGLFFLCGNGVYKGFPPKWSGRCGLGYLVPSLTRYLTLNASQITNLRSFIHKVTPHRCTQRDTDNPPLYCNPKDNSTIRALFPSLGTYDLEKAILNISKAMEQEISATKQTLEAHQSKVSSLASASQKDHVLDIPTTQRQTACRTVGKQCCLYINNSEAIMSDIQHLYEISENLKNGPLFDWEGLFANVGDWFRS

SEQ ID NO: 465 - protein, 465 aa, Semnopithecus entellus
QHLLAPVFRTLSILTNQSNCWLCEHLDNAEQPELVFVPASASTWWTYSGQWMYERVWYPQAEVQNHSTSSYGKATWHWEAAMEAQGLSFAQVRLLEGNFSLCVENKNGTGPFLGNIPKQYCNQILWFDFTDGTFMPSIDVTDESRNDYDDTSVCLGTRQCSWFAGCTNQTWNSSAVPLIGLPNTQDYKWVDRNSGLTWSGNGTCLYSCQNQTKGLLYQLFRNLFCSYGLTEAHGKWRCADANITNDKDHDGHQNPTWWLTGSNLTLSVNNSGLFLLCGNGVYKGFPPKWSGRCGLGYLVPSLTRYLTLNASQITNLRSFIHKVTPHRCTQRDTDNSPLYCNPKDNSTVRALFPSLGTYDLEKAILNISKAMEQEISATKQTLEAHQSKVSSLVSASQKDHVLDIPTTQRQTACRTVGKQCCLYINNSEAIMSDIQHLYEISENLKNGPLFDWEGLFAKVGDWFRS

SEQ ID NO: 466 - protein, 464 aa, Rhinopithecus roxellana
QHLLAPVFRTLSILTNQSNCWLCEHLDNAEQPELVFVPASASTWWTYSGQWMYKRVWYPQAEVQNHSTSSYGKATWHWEAAMEAQGLSFAQVRLLEGNFSLCVENKNGTGPFLGNIPKQYCNQILWFDFTDGTFMPSIDVTDESRNDYDDTSVCLGTRQCSWFAGCTNQTWNSSAVPLIGLPNTQDYKWVDRNSGLTWSGNGTCLYSCQNQTKGLLYQLFRNLFCSYGLTEAHGKWRCADANITNDKGHDGHQTPTWWLTGSNLTLSVNNSGLFLLCGNGVYKGFPPKWSGRCGLGYLVPSLTRYLTLNASQITNLRSFIHKVTPHRCIQRDTDNPPLYCNPKDNSTIRALFPSLGTYLEKAILNISKAMEQEISATKQTLEAHQSKVSSLASASQKDHVLDIPTTQRQTACRTVGKQCCLYINNSEAIMSDIQHLYEISENLKNGPLFDWEGLFAKVGDWFRS

SEQ ID NO: 467 - protein, 458 aa, Marmoset
QHLLAPVFQTLSILTNQSNCWLCEHLDNAEEPELVFVPASASTWWTSSGRWMYERVWHLQAEVQNHSTSSCDKVTHHWEAFMEAQGLSFAQVRLLEGNFSLCVENKNGTGPFLGNIPKQYCIQTLWFDSTDGTFTPSIDVTEESRNDYDDTSVYLRTRQCPWFVDCTNWTWNSSTIPLIGLPSTQDYQWVDRNSGLTWSGNDTCLYSCQNQTKGLLYQLFRNLFCSYGLQEAHGKWRCADANITNDKGHDGHQTPTWWLTGANLTLSLNNSGLFILCGNGVYKGFPPKWSGRCGLGYLVPSLTRHLTLNTSQITNLRSFIHKVTPRRRTKRDTDSAPLYYNPKDNSTVRALFPSLGTSDLEKAILNLSKAIEQEFGATQPTLEGHQSNVSSLTSASPNDRVLDIPTTQRQTACGTVGKQCCLYINNSEDIMANIQRIKDISKNMKNIPLFDWGDWFTS

SEQ ID NO: 468 - protein, 458 aa, Saimiri
QHLLAPVFRTLSILTNQSNCWLCEHLDNAEEPELVFVPASASTWWTYSGQWLYERVCHLQAEMQNHSTSSCDKVTQHWEAFMEAQGLSFAQIRLLEGNFSLCVENKNGTGPFLGNIPKQYCTQTLWFDSTDGTFTPSIDITKESRKDYDDTRVYLRTRQRPWFADRINWTWNSSTVPLIGLPSTQNYQWVDRNSGLTWSGNDTCLYSCQNQTKGLLYQLFRNIFCSYGLTEAHGKWRCADANITNDKGHDGHQTPTWWLTGANLTLSVNNSGLFILCGNGVYKGFPPKWSGRCGLGYLVPSLTRYLTLNASQITNLRSFIHKATPHRRTKRDTHNPPLYHNPKDNSTIRALFPSLGTSDLEKAILNLSKAIEQEFGATQPTLEAHQSKGSSLASASPNDRVLDLPTTQRQTACGTVDKQCCLYINNSEDIMSDIQRIKDIAKNMKNIPLFDWGVWFRS

SEQ ID NO: 469 - protein, 448 aa, Ateles
QHLLAPVFRTLSVLTNQSNCWLCEHLDNAEEPELVFVPASASTWWTHSGQWMYERVWHPQAEVQNHSTSSWDKVTQHWEAFMEAQGLSFAQVKLLEGNFSLCIENKNGTGPFLGNIPKQYCIQTLWFDSTDGTFTPSIDVTKESRNDYDDTSVYLRTNWTWNSSTVPLIGLPGTQDYQWVDRNSGLTWSSNDTCLYSCQNQTKGLLYQLFHNIFCSYGLTEAHGKWGCADANITNDKGHDGHQTPTWWLTGANLTLSVNNSGLFILCGNGVYKGFPPKWSGRCGLGYLVPSLTRYLTLNASQITNLRSFIHKVTLRRRTKRDTDNPPLYYNPKDNSTIKALFPSLGTSDLEKAILNLSKAIDQEFGATQPTLEAHQSKVGSLASASPHDRVLDIPTTQRQTACGTVGKQCCLYINNSEDIMSDIQRIKDISENMKNIPLFDWGDWFIS

SEQ ID NO: 470 - protein, 458 aa, Pithecia
QHLLAPVFRTLSILTNQSNCWLCEHLDNAEEPELVFVPASASTWWTYSGQWIYQRVWHLQAEVQNHSTSSYDKVTQHWEAFMEAQGLSFAQVRLLEGNFSLCVENKNGTGPFLGNIPKQYCIQTLWFDSTDGTFTPSIDVTKESRNDNDDTSVYLHTRQCPWFADCTNWTWNSSTVPLIGLPSTQDYQWVDRNSGLTWSGNDTCLYSCQNQTKGLLYQLFRNIFCSYGLTEAHGKWRCADANITNDKDQNGHQTPTWWLTVANLTLSVNNSGLFILCGNGVYKGFPPKWSGRCGLGRLVPSLTRYLTLNASQITNLRSFIHKVTPHRRTKRDTDNPPLYYNPKDNSTIRALFPSLGTSDLEKAILNLSKAIEQEFSATQPNLEAHQSKVSSLASASPNDRVLDIPTTQRQTACGTVGKQCCLYINNSEDIMSDIQRIKDISENMKNVPLFDWGDWFRS

SEQ ID NO: 471 - protein, 465 aa, Felis catus
RYPLPPLFQTLATLANLSDCWLCQHLDNAQEPELVFVPAHASTWWTHSGQWMHKREWYPQTRGHNHSTSSYGRVLWHWETSAEAQGLSLTQVRLLEGNFSVCIENKNGTGPFLGDVPKQYCNQTVWFDSTDGTFRPSIDVANESKTDYYDANVCLVTGQYSWFAGHTTGTWNSSPFPLVGLPNTQDYIWVDQNSGMTWLGNDTYLYSCQNQTKGLLYQIFRNLFCSYRLTEAHGKWRCADANITNDKGHGGHPMPAWWVTRSTLTLSVNNSGLFILCGNKVYKEFPPNWSGRCGLGYLAPSVSQYPAFNGSQITGVGSLIHKVAPHRRTQRDVIDPPPVYHNPNSLRALFSRLGTSDLEEAILNISKATEQGLAATVQTSEARQSRVSSLLSALQNHHLDLSAAQQGRTCTIVGNQCCLYVNKSKEVRFLLNSVKERIDSRRRMRELAFNWTDLVSGVRDWFSGH

SEQ ID NO: 472 - protein, 464 aa, Pan troglodytes
HLLAPVFRTLSILTNQSNCWLCEHLDNAEQPELVFVPASASTWWTYSGQWMYERMWYPQAEVQNHSTSSYRKVTWHWEASMEAQGLSFAQVRLLEGNFSLCVENKNGSGPFLGNIPKQYCNQILWFDSTDGTFMPSIDVTNESRNDDDDTSVCLGTRQCSWFAGCTNRTWNSSAVPLIGLPNTQDYKWVDRNSGLTWSGNDTCLYSCQNQTKGLLYQLFRNLFCSYGLTEAHGKWRCADANITNDKGHDGHRAPSWWLTGSNLTLSVNNSGLFFLCGNGVYKGFPPKWSGRCGLGYLVPSLTRYLTLNASQITNLRSFIHKVTPHRCTQGDTDNPPLYCNPKDNSTIRALFPSLGTYDLEKAILNISKAMEQEFSATKQTLEAHQSKVSSLASASRKDHVLDIPTTQRQTACGTVGKQCCLYINYSEEIKSNIQRLHEASENLKNVPLLDWQGIFAKVGDWFRS

SEQ ID NO: 473 - protein, 464 aa, Gorilla
HLLAPVFRTLSILTNQSNCWLCEHLDNAEQPELVFVPASASTWWTYSGQWMYERVWYPQAEVQNHSTSSYRKVTWHWEASMEAQGLSFAQVRLLEGNFSLCVENKNGSGPFLGNIPKQYCNQILWFDSTDGTFMPSIDVTNESRNDDDDTSVCLGTRQCSWFAGCTNRTWNSSAVPLIGLPNTQDYKWVDRNSGLTWSGNDTCLYSCQNQTKGLLYQLFRNLFCSYGLTEAHGKWRCADANITNDKGHDGHRTPTWWLTGSNLTLSVNNSGLFFLCGNGVYKGFPPKWSGRCGLGYLVPSLTRYLTLNASQITKLRSFIHKVTPHRCTQGDTDNPPLYCNPKDNSTIRALFPSLGTYDLEKAILNISKAMEQEFSATKQTLEAHQSKVSSLASASRKDHVLDIPTTQRQTACGTVGKQCCLYINYSEEIKSNIQRLHEASENLKNVPLLDWQGIFAKVGDWFRS

SEQ ID NO: 474 - protein, 464 aa, Pongo
HLLAPVFRTLSILTNQSNCWLCEHLDNAEQPELVFVPSSASTWWTYSGQWMYERVWYPQAEVPNPSTSSYGKVTRHWEASMEAQGLSFAQVRLLEGNFSLCVENKNGTGPFLGNIPKQYCNQILWFDSTDGTFMPSIDVTNESRNDYDDTSVCLGTRQCSWFAGCTNRTWNSSAVPLIGLPNTQDYKWVDRNSGLTWSGNDTCLYSCQNQTKGLLYQLFRNLFCSYGLTEAHGKWRCADANITNDKGHDGHQTPTWWLTGSNLTLSVNNSGLFFLCGNGVYKGFPPKWSGRCGLGYLVPSLTRYLTLNASQITNLRSFIHKVTPHRCTQRDTDDPPLYCNPKDNSTIRALFPSLGTYDLEKAILNISKAMEQEFSATKQTLEAHQSKVSSLASASQKDHVLDIPTTQRQTACGTVGKQCCLYINYSEEIKSNIQRLHEASENLKNIPLLDWEGIFAKVGDWFRS

SEQ ID NO: 475 - protein, 464 aa, Hylobates
HLLAPVFRTLSILTNQSNCWLCEHLDNAEQPELVFVPASASTWWTYSGQWVYERVWYPQAEVQNHSTSSYGKVTRHWEASMEAQGLSFAQVRLLEGNLSLCIENKNGTGPFLGNIPKRYCNQILWFDSTDGTFMPSTDVTNESRNDYDDTSVCLGTRQCSWLAGCTNQTWNSSAVPLIGLPNTQDYKWVDRNSGLTWSGNDTCLYSCQNQTKGLLYQLFRNLFCSYGLTEAHGKWRCADVNITNDKGYDGHQTPTWWLTGSNLTLSVNNSGLFFLCGNGVYKGFPPKWSGRCGLGYLVPSLTRYLTLNASQITNLRSFIHKVTPHRCTQRDTDNPPLYCNPKHNSTIRALFPSLGTYDLEKAILNISKAMEQEFSATKQTLEAHQSKVSSLASASRKDHVLDIPTTQRQTACRTVGKQCCLYINHSEEIMSNIQRLREASENLKNVPLLDWEGIFAKVGDWFRS

SEQ ID NO: 476 - protein, 464 aa, Macaca
HLLAPVFKTLSILTNQSNCWLCEHLDNAEQPELVFVPASASTWWTHSGQWMYERVWYPQAEVQNHSTSSYGKVTQHWEASMEAQGLSIAQVRLLEGNFSLCVENKNGTGPFLGNIPKQYCNQILWFDFTDGTFMPSIDVTDESRNDYDDTSVCLGTRQCSWFAGCTNQTWNSSAVPLIGLPNTQDYKWVDRNSGLTWSGNGTCLYSCQNQTKGLLYQLFRNLFCSYGLTEAHGKWRCADANITNDKGHDGHQTPTWWLTGSNLTLSVNNSGLFFLCGNGVYKGFPPKWSGRCGLGYLVPSLTRYLTLNASQITNLRSFIHKVTPHRCTQRDTDNPPLYCNPKDNSTIRALFPSLGTYDLEKAILNISKAMEQEISATKQTLEAHQSKVSSLASASQKDHVLDIPTTQRQTACRTVGKQCCLYINNSEAIMSDIQHLYEISENLKNGPFFDWEGLFAKVGDWFRS

SEQ ID NO: 477 - protein, 464 aa, Papio anubis
HLLAPVFQTLSILTNQSNCWLCEHLDNAEQPELVFVPASASTWWTYSGQWMYERVWYAQAEVQNHSTSSYGKVTQHWEASMEAQGLSFAQVRLLEGNFSLCVENKNGTGPFLGNIPKQYCNQILWFDFTDGTFMPSIDVTDESRNDYDDTSVCLGTRQCSWFAGCTNQTWNSSAVPLIGLPNTQDYKWVDRNSGLTWSGNGTCLYSCQNQTKGLLYQLFRNLFCSYGLTEAHGKWRCADANITNDKGHDGHQTPTWWLTGSNLTLSVNNSGLFFLCGNGVYKGFPPKWSGRCGLGYLVPSLTRYLTLNASQITNLRSFIHKVTPHRCTQRDTDNPPLYCNPKDNSTIRALFPSLGTYDLEKAILNISKAMEQEISATKQTLEAHQSKVSSLASASQKDHVLDIPTTQRQTACRTVGKQCCLYINNSEAIMSDIQHLYEISENLKNGPFFDWEGLFAKVGDWFRS

SEQ ID NO: 478 - protein, 463 aa, Chlorocebus sabeus
HLLAPVFQTLSILTNQSNCWLCEHLDNAEQPELIFVPASASTWWTYSGQWMYERVWYPQAEVQNHSTSSYGKVTRHWEASMEAQGLSFAQVRLLEGNFSLCVENKNGTGPFLGNIPKQYWNQILWFDFTDGTFMPSIDVTDESRNDYDTSVCLGTRQCSWFAGCTNQTWNSSAVPLIGLPNTQDYKWVDRNSGLTWSGNGTCLYSCQNQTKGLLYQLFRNLFCSYGLTEAHGKWRCADANITNDKGHDGHQTPTWWLTGSNLTLSVNNSGLFFLCGNGVYKGFPPKWSGRCGLGYLVPSLTRYLTLNASQITNLRSFIHKVTPHRCTQRDTDNPPLYCNPKDNSTIRALFPSLGTYDLEKAILNISKAMEQEISATKQTLEAHQSKVSSLASASQKDHVLDIPTTQRQTACRTVGKQCCLYINNSEAIMSDIQHLYEISENLKNGPFFDWEGLFAKVGDWFRS

SEQ ID NO: 479 - protein, 464 aa, Colobus angolensis palliatus
HLLAPVFRTLSILTNQSNCWLCEHLDNAEQPELVFVPASASTWWTYSGQWMYERVWYPQAEVQNQSTSSYGKATWHWEASMEAQGLSFAQVRLLEGNFSLCVENKNGTGPFLGNIPKQYCNQILWFDFTDGTFMPSIDVTDESRNDYDDTSVCLGTRQCSWFAGCTNQTWNSSAVPLIGLPNTQDYKWVDRNSGLTWSGNGTCLYSCQNQTRGLLYQLFRNLFCSYGLTQAHGKWRCADANITNDKGHDGHQTPTWWLTGSNLTLSVNNSGLFFLCGNGVYKGFPPKWSGRCGLGYLVPSLTRYLTLNASQITNLRSFIHKVTPHRCTQRDTDNPPLYCNPKDNSTIRALFPSLGTYDLEKAILNISKAMEQEISATKQTLEAHQSKVSSLASASQKDHVLDIPTTQRQTACRTVGKQCCLYINNSEAIMSDIQHLYEISENLKNGPLFDWEGLFANVGDWFRS

SEQ ID NO: 480 - protein, 464 aa, Semnopithecus entellus
HLLAPVFRTLSILTNQSNCWLCEHLDNAEQPELVFVPASASTWWTYSGQWMYERVWYPQAEVQNHSTSSYGKATWHWEAAMEAQGLSFAQVRLLEGNFSLCVENKNGTGPFLGNIPKQYCNQILWFDFTDGTFMPSIDVTDESRNDYDDTSVCLGTRQCSWFAGCTNQTWNSSAVPLIGLPNTQDYKWVDRNSGLTWSGNGTCLYSCQNQTKGLLYQLFRNLFCSYGLTEAHGKWRCADANITNDKDHDGHQNPTWWLTGSNLTLSVNNSGLFLLCGNGVYKGFPPKWSGRCGLGYLVPSLTRYLTLNASQITNLRSFIHKVTPHRCTQRDTDNSPLYCNPKDNSTVRALFPSLGTYDLEKAILNISKAMEQEISATKQTLEAHQSKVSSLVSASQKDHVLDIPTTQRQTACRTVGKQCCLYINNSEAIMSDIQHLYEISENLKNGPLFDWEGLFAKVGDWFRS

SEQ ID NO: 481 - protein, 463 aa, Rhinopithecus roxellana
HLLAPVFRTLSILTNQSNCWLCEHLDNAEQPELVFVPASASTWWTYSGQWMYKRVWYPQAEVQNHSTSSYGKATWHWEAAMEAQGLSFAQVRLLEGNFSLCVENKNGTGPFLGNIPKQYCNQILWFDFTDGTFMPSIDVTDESRNDYDDTSVCLGTRQCSWFAGCTNQTWNSSAVPLIGLPNTQDYKWVDRNSGLTWSGNGTCLYSCQNQTKGLLYQLFRNLFCSYGLTEAHGKWRCADANITNDKGHDGHQTPTWWLTGSNLTLSVNNSGLFLLCGNGVYKGFPPKWSGRCGLGYLVPSLTRYLTLNASQITNLRSFIHKVTPHRCIQRDTDNPPLYCNPKDNSTIRALFPSLGTYLEKAILNISKAMEQEISATKQTLEAHQSKVSSLASASQKDHVLDIPTTQRQTACRTVGKQCCLYINNSEAIMSDIQHLYEISENLKNGPLFDWEGLFAKVGDWFRS

SEQ ID NO: 482 - protein, 457 aa, Marmoset
HLLAPVFQTLSILTNQSNCWLCEHLDNAEEPELVFVPASASTWWTSSGRWMYERVWHLQAEVQNHSTSSCDKVTHHWEAFMEAQGLSFAQVRLLEGNFSLCVENKNGTGPFLGNIPKQYCIQTLWFDSTDGTFTPSIDVTEESRNDYDDTSVYLRTRQCPWFVDCTNWTWNSSTIPLIGLPSTQDYQWVDRNSGLTWSGNDTCLYSCQNQTKGLLYQLFRNLFCSYGLQEAHGKWRCADANITNDKGHDGHQTPTWWLTGANLTLSLNNSGLFILCGNGVYKGFPPKWSGRCGLGYLVPSLTRHLTLNTSQITNLRSFIHKVTPRRRTKRDTDSAPLYYNPKDNSTVRALFPSLGTSDLEKAILNLSKAIEQEFGATQPTLEGHQSNVSSLTSASPNDRVLDIPTTQRQTACGTVGKQCCLYINNSEDIMANIQRIKDISKNMKNIPLFDWGDWFTS

SEQ ID NO: 483 - protein, 457 aa, Saimiri
HLLAPVFRTLSILTNQSNCWLCEHLDNAEEPELVFVPASASTWWTYSGQWLYERVCHLQAEMQNHSTSSCDKVTQHWEAFMEAQGLSFAQIRLLEGNFSLCVENKNGTGPFLGNIPKQYCTQTLWFDSTDGTFTPSIDITKESRKDYDDTRVYLRTRQRPWFADRINWTWNSSTVPLIGLPSTQNYQWVDRNSGLTWSGNDTCLYSCQNQTKGLLYQLFRNIFCSYGLTEAHGKWRCADANITNDKGHDGHQTPTWWLTGANLTLSVNNSGLFILCGNGVYKGFPPKWSGRCGLGYLVPSLTRYLTLNASQITNLRSFIHKATPHRRTKRDTHNPPLYHNPKDNSTIRALFPSLGTSDLEKAILNLSKAIEQEFGATQPTLEAHQSKGSSLASASPNDRVLDLPTTQRQTACGTVDKQCCLYINNSEDIMSDIQRIKDIAKNMKNIPLFDWGVWFRS

SEQ ID NO: 484 - protein, 447 aa, Ateles
HLLAPVFRTLSVLTNQSNCWLCEHLDNAEEPELVFVPASASTWWTHSGQWMYERVWHPQAEVQNHSTSSWDKVTQHWEAFMEAQGLSFAQVKLLEGNFSLCIENKNGTGPFLGNIPKQYCIQTLWFDSTDGTFTPSIDVTKESRNDYDDTSVYLRTNWTWNSSTVPLIGLPGTQDYQWVDRNSGLTWSSNDTCLYSCQNQTKGLLYQLFHNIFCSYGLTEAHGKWGCADANITNDKGHDGHQTPTWWLTGANLTLSVNNSGLFILCGNGVYKGFPPKWSGRCGLGYLVPSLTRYLTLNASQITNLRSFIHKVTLRRRTKRDTDNPPLYYNPKDNSTIKALFPSLGTSDLEKAILNLSKAIDQEFGATQPTLEAHQSKVGSLASASPHDRVLDIPTTQRQTACGTVGKQCCLYINNSEDIMSDIQRIKDISENMKNIPLFDWGDWFIS

SEQ ID NO: 485 - protein, 457 aa, Pithecia
HLLAPVFRTLSILTNQSNCWLCEHLDNAEEPELVFVPASASTWWTYSGQWIYQRVWHLQAEVQNHSTSSYDKVTQHWEAFMEAQGLSFAQVRLLEGNFSLCVENKNGTGPFLGNIPKQYCIQTLWFDSTDGTFTPSIDVTKESRNDNDDTSVYLHTRQCPWFADCTNWTWNSSTVPLIGLPSTQDYQWVDRNSGLTWSGNDTCLYSCQNQTKGLLYQLFRNIFCSYGLTEAHGKWRCADANITNDKDQNGHQTPTWWLTVANLTLSVNNSGLFILCGNGVYKGFPPKWSGRCGLGRLVPSLTRYLTLNASQITNLRSFIHKVTPHRRTKRDTDNPPLYYNPKDNSTIRALFPSLGTSDLEKAILNLSKAIEQEFSATQPNLEAHQSKVSSLASASPNDRVLDIPTTQRQTACGTVGKQCCLYINNSEDIMSDIQRIKDISENMKNVPLFDWGDWFRS

SEQ ID NO: 486 - protein, 464 aa, Felis catus
YPLPPLFQTLATLANLSDCWLCQHLDNAQEPELVFVPAHASTWWTHSGQWMHKREWYPQTRGHNHSTSSYGRVLWHWETSAEAQGLSLTQVRLLEGNFSVCIENKNGTGPFLGDVPKQYCNQTVWFDSTDGTFRPSIDVANESKTDYYDANVCLVTGQYSWFAGHTTGTWNSSPFPLVGLPNTQDYIWVDQNSGMTWLGNDTYLYSCQNQTKGLLYQIFRNLFCSYRLTEAHGKWRCADANITNDKGHGGHPMPAWWVTRSTLTLSVNNSGLFILCGNKVYKEFPPNWSGRCGLGYLAPSVSQYPAFNGSQITGVGSLIHKVAPHRRTQRDVIDPPPVYHNPNSLRALFSRLGTSDLEEAILNISKATEQGLAATVQTSEARQSRVSSLLSALQNHHLDLSAAQQGRTCTIVGNQCCLYVNKSKEVRFLLNSVKERIDSRRRMRELAFNWTDLVSGVRDWFSGH

SEQ ID NO: 487 - protein, 462 aa, Pan troglodytes
LLAPVFRTLSILTNQSNCWLCEHLDNAEQPELVFVPASASTWWTYSGQWMYERMWYPQAEVQNHSTSSYRKVTWHWEASMEAQGLSFAQVRLLEGNFSLCVENKNGSGPFLGNIPKQYCNQILWFDSTDGTFMPSIDVTNESRNDDDDTSVCLGTRQCSWFAGCTNRTWNSSAVPLIGLPNTQDYKWVDRNSGLTWSGNDTCLYSCQNQTKGLLYQLFRNLFCSYGLTEAHGKWRCADANITNDKGHDGHRAPSWWLTGSNLTLSVNNSGLFFLCGNGVYKGFPPKWSGRCGLGYLVPSLTRYLTLNASQITNLRSFIHKVTPHRCTQGDTDNPPLYCNPKDNSTIRALFPSLGTYDLEKAILNISKAMEQEFSATKQTLEAHQSKVSSLASASRKDHVLDIPTTQRQTACGTVGKQCCLYINYSEEIKSNIQRLHEASENLKNVPLLDWQGIFAKVGDWFR

SEQ ID NO: 488 - protein, 462 aa, Gorilla
LLAPVFRTLSILTNQSNCWLCEHLDNAEQPELVFVPASASTWWTYSGQWMYERVWYPQAEVQNHSTSSYRKVTWHWEASMEAQGLSFAQVRLLEGNFSLCVENKNGSGPFLGNIPKQYCNQILWFDSTDGTFMPSIDVTNESRNDDDDTSVCLGTRQCSWFAGCTNRTWNSSAVPLIGLPNTQDYKWVDRNSGLTWSGNDTCLYSCQNQTKGLLYQLFRNLFCSYGLTEAHGKWRCADANITNDKGHDGHRTPTWWLTGSNLTLSVNNSGLFFLCGNGVYKGFPPKWSGRCGLGYLVPSLTRYLTLNASQITKLRSFIHKVTPHRCTQGDTDNPPLYCNPKDNSTIRALFPSLGTYDLEKAILNISKAMEQEFSATKQTLEAHQSKVSSLASASRKDHVLDIPTTQRQTACGTVGKQCCLYINYSEEIKSNIQRLHEASENLKNVPLLDWQGIFAKVGDWFR

SEQ ID NO: 489 - protein, 462 aa, Pongo
LLAPVFRTLSILTNQSNCWLCEHLDNAEQPELVFVPSSASTWWTYSGQWMYERVWYPQAEVPNPSTSSYGKVTRHWEASMEAQGLSFAQVRLLEGNFSLCVENKNGTGPFLGNIPKQYCNQILWFDSTDGTFMPSIDVTNESRNDYDDTSVCLGTRQCSWFAGCTNRTWNSSAVPLIGLPNTQDYKWVDRNSGLTWSGNDTCLYSCQNQTKGLLYQLFRNLFCSYGLTEAHGKWRCADANITNDKGHDGHQTPTWWLTGSNLTLSVNNSGLFFLCGNGVYKGFPPKWSGRCGLGYLVPSLTRYLTLNASQITNLRSFIHKVTPHRCTQRDTDDPPLYCNPKDNSTIRALFPSLGTYDLEKAILNISKAMEQEFSATKQTLEAHQSKVSSLASASQKDHVLDIPTTQRQTACGTVGKQCCLYINYSEEIKSNIQRLHEASENLKNIPLLDWEGIFAKVGDWFR

SEQ ID NO: 490 - protein, 462 aa, Hylobates
LLAPVFRTLSILTNQSNCWLCEHLDNAEQPELVFVPASASTWWTYSGQWVYERVWYPQAEVQNHSTSSYGKVTRHWEASMEAQGLSFAQVRLLEGNLSLCIENKNGTGPFLGNIPKRYCNQILWFDSTDGTFMPSTDVTNESRNDYDDTSVCLGTRQCSWLAGCTNQTWNSSAVPLIGLPNTQDYKWVDRNSGLTWSGNDTCLYSCQNQTKGLLYQLFRNLFCSYGLTEAHGKWRCADVNITNDKGYDGHQTPTWWLTGSNLTLSVNNSGLFFLCGNGVYKGFPPKWSGRCGLGYLVPSLTRYLTLNASQITNLRSFIHKVTPHRCTQRDTDNPPLYCNPKHNSTIRALFPSLGTYDLEKAILNISKAMEQEFSATKQTLEAHQSKVSSLASASRKDHVLDIPTTQRQTACRTVGKQCCLYINHSEEIMSNIQRLREASENLKNVPLLDWEGIFAKVGDWFR

SEQ ID NO: 491 - protein, 462 aa, Macaca
LLAPVFKTLSILTNQSNCWLCEHLDNAEQPELVFVPASASTWWTHSGQWMYERVWYPQAEVQNHSTSSYGKVTQHWEASMEAQGLSIAQVRLLEGNFSLCVENKNGTGPFLGNIPKQYCNQILWFDFTDGTFMPSIDVTDESRNDYDDTSVCLGTRQCSWFAGCTNQTWNSSAVPLIGLPNTQDYKWVDRNSGLTWSGNGTCLYSCQNQTKGLLYQLFRNLFCSYGLTEAHGKWRCADANITNDKGHDGHQTPTWWLTGSNLTLSVNNSGLFFLCGNGVYKGFPPKWSGRCGLGYLVPSLTRYLTLNASQITNLRSFIHKVTPHRCTQRDTDNPPLYCNPKDNSTIRALFPSLGTYDLEKAILNISKAMEQEISATKQTLEAHQSKVSSLASASQKDHVLDIPTTQRQTACRTVGKQCCLYINNSEAIMSDIQHLYEISENLKNGPFFDWEGLFAKVGDWFR

SEQ ID NO: 492 - protein, 462 aa, Papio anubis
LLAPVFQTLSILTNQSNCWLCEHLDNAEQPELVFVPASASTWWTYSGQWMYERVWYAQAEVQNHSTSSYGKVTQHWEASMEAQGLSFAQVRLLEGNFSLCVENKNGTGPFLGNIPKQYCNQILWFDFTDGTFMPSIDVTDESRNDYDDTSVCLGTRQCSWFAGCTNQTWNSSAVPLIGLPNTQDYKWVDRNSGLTWSGNGTCLYSCQNQTKGLLYQLFRNLFCSYGLTEAHGKWRCADANITNDKGHDGHQTPTWWLTGSNLTLSVNNSGLFFLCGNGVYKGFPPKWSGRCGLGYLVPSLTRYLTLNASQITNLRSFIHKVTPHRCTQRDTDNPPLYCNPKDNSTIRALFPSLGTYDLEKAILNISKAMEQEISATKQTLEAHQSKVSSLASASQKDHVLDIPTTQRQTACRTVGKQCCLYINNSEAIMSDIQHLYEISENLKNGPFFDWEGLFAKVGDWFR

SEQ ID NO: 493 - protein, 461 aa, Chlorocebus sabeus
LLAPVFQTLSILTNQSNCWLCEHLDNAEQPELIFVPASASTWWTYSGQWMYERVWYPQAEVQNHSTSSYGKVTRHWEASMEAQGLSFAQVRLLEGNFSLCVENKNGTGPFLGNIPKQYWNQILWFDFTDGTFMPSIDVTDESRNDYDTSVCLGTRQCSWFAGCTNQTWNSSAVPLIGLPNTQDYKWVDRNSGLTWSGNGTCLYSCQNQTKGLLYQLFRNLFCSYGLTEAHGKWRCADANITNDKGHDGHQTPTWWLTGSNLTLSVNNSGLFFLCGNGVYKGFPPKWSGRCGLGYLVPSLTRYLTLNASQITNLRSFIHKVTPHRCTQRDTDNPPLYCNPKDNSTIRALFPSLGTYDLEKAILNISKAMEQEISATKQTLEAHQSKVSSLASASQKDHVLDIPTTQRQTACRTVGKQCCLYINNSEAIMSDIQHLYEISENLKNGPFFDWEGLFAKVGDWFR

SEQ ID NO: 494 - protein, 462 aa, Colobus angolensis palliatus
LLAPVFRTLSILTNQSNCWLCEHLDNAEQPELVFVPASASTWWTYSGQWMYERVWYPQAEVQNQSTSSYGKATWHWEASMEAQGLSFAQVRLLEGNFSLCVENKNGTGPFLGNIPKQYCNQILWFDFTDGTFMPSIDVTDESRNDYDDTSVCLGTRQCSWFAGCTNQTWNSSAVPLIGLPNTQDYKWVDRNSGLTWSGNGTCLYSCQNQTRGLLYQLFRNLFCSYGLTQAHGKWRCADANITNDKGHDGHQTPTWWLTGSNLTLSVNNSGLFFLCGNGVYKGFPPKWSGRCGLGYLVPSLTRYLTLNASQITNLRSFIHKVTPHRCTQRDTDNPPLYCNPKDNSTIRALFPSLGTYDLEKAILNISKAMEQEISATKQTLEAHQSKVSSLASASQKDHVLDIPTTQRQTACRTVGKQCCLYINNSEAIMSDIQHLYEISENLKNGPLFDWEGLFANVGDWFR

SEQ ID NO: 495 - protein, 462 aa, Semnopithecus entellus
LLAPVFRTLSILTNQSNCWLCEHLDNAEQPELVFVPASASTWWTYSGQWMYERVWYPQAEVQNHSTSSYGKATWHWEAAMEAQGLSFAQVRLLEGNFSLCVENKNGTGPFLGNIPKQYCNQILWFDFTDGTFMPSIDVTDESRNDYDDTSVCLGTRQCSWFAGCTNQTWNSSAVPLIGLPNTQDYKWVDRNSGLTWSGNGTCLYSCQNQTKGLLYQLFRNLFCSYGLTEAHGKWRCADANITNDKDHDGHQNPTWWLTGSNLTLSVNNSGLFLLCGNGVYKGFPPKWSGRCGLGYLVPSLTRYLTLNASQITNLRSFIHKVTPHRCTQRDTDNSPLYCNPKDNSTVRALFPSLGTYDLEKAILNISKAMEQEISATKQTLEAHQSKVSSLVSASQKDHVLDIPTTQRQTACRTVGKQCCLYINNSEAIMSDIQHLYEISENLKNGPLFDWEGLFAKVGDWFR

SEQ ID NO: 496 - protein, 461 aa, Rhinopithecus roxellana
LLAPVFRTLSILTNQSNCWLCEHLDNAEQPELVFVPASASTWWTYSGQWMYKRVWYPQAEVQNHSTSSYGKATWHWEAAMEAQGLSFAQVRLLEGNFSLCVENKNGTGPFLGNIPKQYCNQILWFDFTDGTFMPSIDVTDESRNDYDDTSVCLGTRQCSWFAGCTNQTWNSSAVPLIGLPNTQDYKWVDRNSGLTWSGNGTCLYSCQNQTKGLLYQLFRNLFCSYGLTEAHGKWRCADANITNDKGHDGHQTPTWWLTGSNLTLSVNNSGLFLLCGNGVYKGFPPKWSGRCGLGYLVPSLTRYLTLNASQITNLRSFIHKVTPHRCIQRDTDNPPLYCNPKDNSTIRALFPSLGTYLEKAILNISKAMEQEISATKQTLEAHQSKVSSLASASQKDHVLDIPTTQRQTACRTVGKQCCLYINNSEAIMSDIQHLYEISENLKNGPLFDWEGLFAKVGDWFR

SEQ ID NO: 497 - protein, 455 aa, Marmoset
LLAPVFQTLSILTNQSNCWLCEHLDNAEEPELVFVPASASTWWTSSGRWMYERVWHLQAEVQNHSTSSCDKVTHHWEAFMEAQGLSFAQVRLLEGNFSLCVENKNGTGPFLGNIPKQYCIQTLWFDSTDGTFTPSIDVTEESRNDYDDTSVYLRTRQCPWFVDCTNWTWNSSTIPLIGLPSTQDYQWVDRNSGLTWSGNDTCLYSCQNQTKGLLYQLFRNLFCSYGLQEAHGKWRCADANITNDKGHDGHQTPTWWLTGANLTLSLNNSGLFILCGNGVYKGFPPKWSGRCGLGYLVPSLTRHLTLNTSQITNLRSFIHKVTPRRRTKRDTDSAPLYYNPKDNSTVRALFPSLGTSDLEKAILNLSKAIEQEFGATQPTLEGHQSNVSSLTSASPNDRVLDIPTTQRQTACGTVGKQCCLYINNSEDIMANIQRIKDISKNMKNIPLFDWGDWFT

SEQ ID NO: 498 - protein, 455 aa, Saimiri
LLAPVFRTLSILTNQSNCWLCEHLDNAEEPELVFVPASASTWWTYSGQWLYERVCHLQAEMQNHSTSSCDKVTQHWEAFMEAQGLSFAQIRLLEGNFSLCVENKNGTGPFLGNIPKQYCTQTLWFDSTDGTFTPSIDITKESRKDYDDTRVYLRTRQRPWFADRINWTWNSSTVPLIGLPSTQNYQWVDRNSGLTWSGNDTCLYSCQNQTKGLLYQLFRNIFCSYGLTEAHGKWRCADANITNDKGHDGHQTPTWWLTGANLTLSVNNSGLFILCGNGVYKGFPPKWSGRCGLGYLVPSLTRYLTLNASQITNLRSFIHKATPHRRTKRDTHNPPLYHNPKDNSTIRALFPSLGTSDLEKAILNLSKAIEQEFGATQPTLEAHQSKGSSLASASPNDRVLDLPTTQRQTACGTVDKQCCLYINNSEDIMSDIQRIKDIAKNMKNIPLFDWGVWFR

SEQ ID NO: 499 - protein, 445 aa, Ateles
LLAPVFRTLSVLTNQSNCWLCEHLDNAEEPELVFVPASASTWWTHSGQWMYERVWHPQAEVQNHSTSSWDKVTQHWEAFMEAQGLSFAQVKLLEGNFSLCIENKNGTGPFLGNIPKQYCIQTLWFDSTDGTFTPSIDVTKESRNDYDDTSVYLRTNWTWNSSTVPLIGLPGTQDYQWVDRNSGLTWSSNDTCLYSCQNQTKGLLYQLFHNIFCSYGLTEAHGKWGCADANITNDKGHDGHQTPTWWLTGANLTLSVNNSGLFILCGNGVYKGFPPKWSGRCGLGYLVPSLTRYLTLNASQITNLRSFIHKVTLRRRTKRDTDNPPLYYNPKDNSTIKALFPSLGTSDLEKAILNLSKAIDQEFGATQPTLEAHQSKVGSLASASPHDRVLDIPTTQRQTACGTVGKQCCLYINNSEDIMSDIQRIKDISENMKNIPLFDWGDWFI

SEQ ID NO: 500 - protein, 455 aa, Pithecia
LLAPVFRTLSILTNQSNCWLCEHLDNAEEPELVFVPASASTWWTYSGQWIYQRVWHLQAEVQNHSTSSYDKVTQHWEAFMEAQGLSFAQVRLLEGNFSLCVENKNGTGPFLGNIPKQYCIQTLWFDSTDGTFTPSIDVTKESRNDNDDTSVYLHTRQCPWFADCTNWTWNSSTVPLIGLPSTQDYQWVDRNSGLTWSGNDTCLYSCQNQTKGLLYQLFRNIFCSYGLTEAHGKWRCADANITNDKDQNGHQTPTWWLTVANLTLSVNNSGLFILCGNGVYKGFPPKWSGRCGLGRLVPSLTRYLTLNASQITNLRSFIHKVTPHRRTKRDTDNPPLYYNPKDNSTIRALFPSLGTSDLEKAILNLSKAIEQEFSATQPNLEAHQSKVSSLASASPNDRVLDIPTTQRQTACGTVGKQCCLYINNSEDIMSDIQRIKDISENMKNVPLFDWGDWFR

SEQ ID NO: 501 - protein, 462 aa, Felis catus
PLPPLFQTLATLANLSDCWLCQHLDNAQEPELVFVPAHASTWWTHSGQWMHKREWYPQTRGHNHSTSSYGRVLWHWETSAEAQGLSLTQVRLLEGNFSVCIENKNGTGPFLGDVPKQYCNQTVWFDSTDGTFRPSIDVANESKTDYYDANVCLVTGQYSWFAGHTTGTWNSSPFPLVGLPNTQDYIWVDQNSGMTWLGNDTYLYSCQNQTKGLLYQIFRNLFCSYRLTEAHGKWRCADANITNDKGHGGHPMPAWWVTRSTLTLSVNNSGLFILCGNKVYKEFPPNWSGRCGLGYLAPSVSQYPAFNGSQITGVGSLIHKVAPHRRTQRDVIDPPPVYHNPNSLRALFSRLGTSDLEEAILNISKATEQGLAATVQTSEARQSRVSSLLSALQNHHLDLSAAQQGRTCTIVGNQCCLYVNKSKEVRFLLNSVKERIDSRRRMRELAFNWTDLVSGVRDWFSG

SEQ ID NO: 502 - protein, 464 aa, Pan troglodytes
QHLLAPVFRTLSILTNQSNCWLCEHLDNAEQPELVFVPASASTWWTYSGQWMYERMWYPQAEVQNHSTSSYRKVTWHWEASMEAQGLSFAQVRLLEGNFSLCVENKNGSGPFLGNIPKQYCNQILWFDSTDGTFMPSIDVTNESRNDDDDTSVCLGTRQCSWFAGCTNRTWNSSAVPLIGLPNTQDYKWVDRNSGLTWSGNDTCLYSCQNQTKGLLYQLFRNLFCSYGLTEAHGKWRCADANITNDKGHDGHRAPSWWLTGSNLTLSVNNSGLFFLCGNGVYKGFPPKWSGRCGLGYLVPSLTRYLTLNASQITNLRSFIHKVTPHRCTQGDTDNPPLYCNPKDNSTIRALFPSLGTYDLEKAILNISKAMEQEFSATKQTLEAHQSKVSSLASASRKDHVLDIPTTQRQTACGTVGKQCCLYINYSEEIKSNIQRLHEASENLKNVPLLDWQGIFAKVGDWFR

SEQ ID NO: 503 - protein, 464 aa, Gorilla
QHLLAPVFRTLSILTNQSNCWLCEHLDNAEQPELVFVPASASTWWTYSGQWMYERVWYPQAEVQNHSTSSYRKVTWHWEASMEAQGLSFAQVRLLEGNFSLCVENKNGSGPFLGNIPKQYCNQILWFDSTDGTFMPSIDVTNESRNDDDDTSVCLGTRQCSWFAGCTNRTWNSSAVPLIGLPNTQDYKWVDRNSGLTWSGNDTCLYSCQNQTKGLLYQLFRNLFCSYGLTEAHGKWRCADANITNDKGHDGHRTPTWWLTGSNLTLSVNNSGLFFLCGNGVYKGFPPKWSGRCGLGYLVPSLTRYLTLNASQITKLRSFIHKVTPHRCTQGDTDNPPLYCNPKDNSTIRALFPSLGTYDLEKAILNISKAMEQEFSATKQTLEAHQSKVSSLASASRKDHVLDIPTTQRQTACGTVGKQCCLYINYSEEIKSNIQRLHEASENLKNVPLLDWQGIFAKVGDWFR

SEQ ID NO: 504 - protein, 464 aa, Pongo
QHLLAPVFRTLSILTNQSNCWLCEHLDNAEQPELVFVPSSASTWWTYSGQWMYERVWYPQAEVPNPSTSSYGKVTRHWEASMEAQGLSFAQVRLLEGNFSLCVENKNGTGPFLGNIPKQYCNQILWFDSTDGTFMPSIDVTNESRNDYDDTSVCLGTRQCSWFAGCTNRTWNSSAVPLIGLPNTQDYKWVDRNSGLTWSGNDTCLYSCQNQTKGLLYQLFRNLFCSYGLTEAHGKWRCADANITNDKGHDGHQTPTWWLTGSNLTLSVNNSGLFFLCGNGVYKGFPPKWSGRCGLGYLVPSLTRYLTLNASQITNLRSFIHKVTPHRCTQRDTDDPPLYCNPKDNSTIRALFPSLGTYDLEKAILNISKAMEQEFSATKQTLEAHQSKVSSLASASQKDHVLDIPTTQRQTACGTVGKQCCLYINYSEEIKSNIQRLHEASENLKNIPLLDWEGIFAKVGDWFR

SEQ ID NO: 505 - protein, 464 aa, Hylobates
QHLLAPVFRTLSILTNQSNCWLCEHLDNAEQPELVFVPASASTWWTYSGQWVYERVWYPQAEVQNHSTSSYGKVTRHWEASMEAQGLSFAQVRLLEGNLSLCIENKNGTGPFLGNIPKRYCNQILWFDSTDGTFMPSTDVTNESRNDYDDTSVCLGTRQCSWLAGCTNQTWNSSAVPLIGLPNTQDYKWVDRNSGLTWSGNDTCLYSCQNQTKGLLYQLFRNLFCSYGLTEAHGKWRCADVNITNDKGYDGHQTPTWWLTGSNLTLSVNNSGLFFLCGNGVYKGFPPKWSGRCGLGYLVPSLTRYLTLNASQITNLRSFIHKVTPHRCTQRDTDNPPLYCNPKHNSTIRALFPSLGTYDLEKAILNISKAMEQEFSATKQTLEAHQSKVSSLASASRKDHVLDIPTTQRQTACRTVGKQCCLYINHSEEIMSNIQRLREASENLKNVPLLDWEGIFAKVGDWFR

SEQ ID NO: 506 - protein, 464 aa, Macaca
QHLLAPVFKTLSILTNQSNCWLCEHLDNAEQPELVFVPASASTWWTHSGQWMYERVWYPQAEVQNHSTSSYGKVTQHWEASMEAQGLSIAQVRLLEGNFSLCVENKNGTGPFLGNIPKQYCNQILWFDFTDGTFMPSIDVTDESRNDYDDTSVCLGTRQCSWFAGCTNQTWNSSAVPLIGLPNTQDYKWVDRNSGLTWSGNGTCLYSCQNQTKGLLYQLFRNLFCSYGLTEAHGKWRCADANITNDKGHDGHQTPTWWLTGSNLTLSVNNSGLFFLCGNGVYKGFPPKWSGRCGLGYLVPSLTRYLTLNASQITNLRSFIHKVTPHRCTQRDTDNPPLYCNPKDNSTIRALFPSLGTYDLEKAILNISKAMEQEISATKQTLEAHQSKVSSLASASQKDHVLDIPTTQRQTACRTVGKQCCLYINNSEAIMSDIQHLYEISENLKNGPFFDWEGLFAKVGDWFR

SEQ ID NO: 507 - protein, 464 aa, Papio anubis
QHLLAPVFQTLSILTNQSNCWLCEHLDNAEQPELVFVPASASTWWTYSGQWMYERVWYAQAEVQNHSTSSYGKVTQHWEASMEAQGLSFAQVRLLEGNFSLCVENKNGTGPFLGNIPKQYCNQILWFDFTDGTFMPSIDVTDESRNDYDDTSVCLGTRQCSWFAGCTNQTWNSSAVPLIGLPNTQDYKWVDRNSGLTWSGNGTCLYSCQNQTKGLLYQLFRNLFCSYGLTEAHGKWRCADANITNDKGHDGHQTPTWWLTGSNLTLSVNNSGLFFLCGNGVYKGFPPKWSGRCGLGYLVPSLTRYLTLNASQITNLRSFIHKVTPHRCTQRDTDNPPLYCNPKDNSTIRALFPSLGTYDLEKAILNISKAMEQEISATKQTLEAHQSKVSSLASASQKDHVLDIPTTQRQTACRTVGKQCCLYINNSEAIMSDIQHLYEISENLKNGPFFDWEGLFAKVGDWFR

SEQ ID NO: 508 - protein, 463 aa, Chlorocebus sabeus
QHLLAPVFQTLSILTNQSNCWLCEHLDNAEQPELIFVPASASTWWTYSGQWMYERVWYPQAEVQNHSTSSYGKVTRHWEASMEAQGLSFAQVRLLEGNFSLCVENKNGTGPFLGNIPKQYWNQILWFDFTDGTFMPSIDVTDESRNDYDTSVCLGTRQCSWFAGCTNQTWNSSAVPLIGLPNTQDYKWVDRNSGLTWSGNGTCLYSCQNQTKGLLYQLFRNLFCSYGLTEAHGKWRCADANITNDKGHDGHQTPTWWLTGSNLTLSVNNSGLFFLCGNGVYKGFPPKWSGRCGLGYLVPSLTRYLTLNASQITNLRSFIHKVTPHRCTQRDTDNPPLYCNPKDNSTIRALFPSLGTYDLEKAILNISKAMEQEISATKQTLEAHQSKVSSLASASQKDHVLDIPTTQRQTACRTVGKQCCLYINNSEAIMSDIQHLYEISENLKNGPFFDWEGLFAKVGDWFR

SEQ ID NO: 509 - protein, 464 aa, Colobus angolensis palliatus
QHLLAPVFRTLSILTNQSNCWLCEHLDNAEQPELVFVPASASTWWTYSGQWMYERVWYPQAEVQNQSTSSYGKATWHWEASMEAQGLSFAQVRLLEGNFSLCVENKNGTGPFLGNIPKQYCNQILWFDFTDGTFMPSIDVTDESRNDYDDTSVCLGTRQCSWFAGCTNQTWNSSAVPLIGLPNTQDYKWVDRNSGLTWSGNGTCLYSCQNQTRGLLYQLFRNLFCSYGLTQAHGKWRCADANITNDKGHDGHQTPTWWLTGSNLTLSVNNSGLFFLCGNGVYKGFPPKWSGRCGLGYLVPSLTRYLTLNASQITNLRSFIHKVTPHRCTQRDTDNPPLYCNPKDNSTIRALFPSLGTYDLEKAILNISKAMEQEISATKQTLEAHQSKVSSLASASQKDHVLDIPTTQRQTACRTVGKQCCLYINNSEAIMSDIQHLYEISENLKNGPLFDWEGLFANVGDWFR

SEQ ID NO: 510 - protein, 464 aa, Semnopithecus entellus
QHLLAPVFRTLSILTNQSNCWLCEHLDNAEQPELVFVPASASTWWTYSGQWMYERVWYPQAEVQNHSTSSYGKATWHWEAAMEAQGLSFAQVRLLEGNFSLCVENKNGTGPFLGNIPKQYCNQILWFDFTDGTFMPSIDVTDESRNDYDDTSVCLGTRQCSWFAGCTNQTWNSSAVPLIGLPNTQDYKWVDRNSGLTWSGNGTCLYSCQNQTKGLLYQLFRNLFCSYGLTEAHGKWRCADANITNDKDHDGHQNPTWWLTGSNLTLSVNNSGLFLLCGNGVYKGFPPKWSGRCGLGYLVPSLTRYLTLNASQITNLRSFIHKVTPHRCTQRDTDNSPLYCNPKDNSTVRALFPSLGTYDLEKAILNISKAMEQEISATKQTLEAHQSKVSSLVSASQKDHVLDIPTTQRQTACRTVGKQCCLYINNSEAIMSDIQHLYEISENLKNGPLFDWEGLFAKVGDWFR

SEQ ID NO: 511 - protein, 463 aa, Rhinopithecus roxellana
QHLLAPVFRTLSILTNQSNCWLCEHLDNAEQPELVFVPASASTWWTYSGQWMYKRVWYPQAEVQNHSTSSYGKATWHWEAAMEAQGLSFAQVRLLEGNFSLCVENKNGTGPFLGNIPKQYCNQILWFDFTDGTFMPSIDVTDESRNDYDDTSVCLGTRQCSWFAGCTNQTWNSSAVPLIGLPNTQDYKWVDRNSGLTWSGNGTCLYSCQNQTKGLLYQLFRNLFCSYGLTEAHGKWRCADANITNDKGHDGHQTPTWWLTGSNLTLSVNNSGLFLLCGNGVYKGFPPKWSGRCGLGYLVPSLTRYLTLNASQITNLRSFIHKVTPHRCIQRDTDNPPLYCNPKDNSTIRALFPSLGTYLEKAILNISKAMEQEISATKQTLEAHQSKVSSLASASQKDHVLDIPTTQRQTACRTVGKQCCLYINNSEAIMSDIQHLYEISENLKNGPLFDWEGLFAKVGDWFR

SEQ ID NO: 512 - protein, 457 aa, Marmoset
QHLLAPVFQTLSILTNQSNCWLCEHLDNAEEPELVFVPASASTWWTSSGRWMYERVWHLQAEVQNHSTSSCDKVTHHWEAFMEAQGLSFAQVRLLEGNFSLCVENKNGTGPFLGNIPKQYCIQTLWFDSTDGTFTPSIDVTEESRNDYDDTSVYLRTRQCPWFVDCTNWTWNSSTIPLIGLPSTQDYQWVDRNSGLTWSGNDTCLYSCQNQTKGLLYQLFRNLFCSYGLQEAHGKWRCADANITNDKGHDGHQTPTWWLTGANLTLSLNNSGLFILCGNGVYKGFPPKWSGRCGLGYLVPSLTRHLTLNTSQITNLRSFIHKVTPRRRTKRDTDSAPLYYNPKDNSTVRALFPSLGTSDLEKAILNLSKAIEQEFGATQPTLEGHQSNVSSLTSASPNDRVLDIPTTQRQTACGTVGKQCCLYINNSEDIMANIQRIKDISKNMKNIPLFDWGDWFT

SEQ ID NO: 513 - protein, 457 aa, Saimiri
QHLLAPVFRTLSILTNQSNCWLCEHLDNAEEPELVFVPASASTWWTYSGQWLYERVCHLQAEMQNHSTSSCDKVTQHWEAFMEAQGLSFAQIRLLEGNFSLCVENKNGTGPFLGNIPKQYCTQTLWFDSTDGTFTPSIDITKESRKDYDDTRVYLRTRQRPWFADRINWTWNSSTVPLIGLPSTQNYQWVDRNSGLTWSGNDTCLYSCQNQTKGLLYQLFRNIFCSYGLTEAHGKWRCADANITNDKGHDGHQTPTWWLTGANLTLSVNNSGLFILCGNGVYKGFPPKWSGRCGLGYLVPSLTRYLTLNASQITNLRSFIHKATPHRRTKRDTHNPPLYHNPKDNSTIRALFPSLGTSDLEKAILNLSKAIEQEFGATQPTLEAHQSKGSSLASASPNDRVLDLPTTQRQTACGTVDKQCCLYINNSEDIMSDIQRIKDIAKNMKNIPLFDWGVWFR

SEQ ID NO: 514 - protein, 447 aa, Ateles
QHLLAPVFRTLSVLTNQSNCWLCEHLDNAEEPELVFVPASASTWWTHSGQWMYERVWHPQAEVQNHSTSSWDKVTQHWEAFMEAQGLSFAQVKLLEGNFSLCIENKNGTGPFLGNIPKQYCIQTLWFDSTDGTFTPSIDVTKESRNDYDDTSVYLRTNWTWNSSTVPLIGLPGTQDYQWVDRNSGLTWSSNDTCLYSCQNQTKGLLYQLFHNIFCSYGLTEAHGKWGCADANITNDKGHDGHQTPTWWLTGANLTLSVNNSGLFILCGNGVYKGFPPKWSGRCGLGYLVPSLTRYLTLNASQITNLRSFIHKVTLRRRTKRDTDNPPLYYNPKDNSTIKALFPSLGTSDLEKAILNLSKAIDQEFGATQPTLEAHQSKVGSLASASPHDRVLDIPTTQRQTACGTVGKQCCLYINNSEDIMSDIQRIKDISENMKNIPLFDWGDWFI

SEQ ID NO: 515 - protein, 457 aa, Pithecia
QHLLAPVFRTLSILTNQSNCWLCEHLDNAEEPELVFVPASASTWWTYSGQWIYQRVWHLQAEVQNHSTSSYDKVTQHWEAFMEAQGLSFAQVRLLEGNFSLCVENKNGTGPFLGNIPKQYCIQTLWFDSTDGTFTPSIDVTKESRNDNDDTSVYLHTRQCPWFADCTNWTWNSSTVPLIGLPSTQDYQWVDRNSGLTWSGNDTCLYSCQNQTKGLLYQLFRNIFCSYGLTEAHGKWRCADANITNDKDQNGHQTPTWWLTVANLTLSVNNSGLFILCGNGVYKGFPPKWSGRCGLGRLVPSLTRYLTLNASQITNLRSFIHKVTPHRRTKRDTDNPPLYYNPKDNSTIRALFPSLGTSDLEKAILNLSKAIEQEFSATQPNLEAHQSKVSSLASASPNDRVLDIPTTQRQTACGTVGKQCCLYINNSEDIMSDIQRIKDISENMKNVPLFDWGDWFR

SEQ ID NO: 516 - protein, 464 aa, Felis catus
RYPLPPLFQTLATLANLSDCWLCQHLDNAQEPELVFVPAHASTWWTHSGQWMHKREWYPQTRGHNHSTSSYGRVLWHWETSAEAQGLSLTQVRLLEGNFSVCIENKNGTGPFLGDVPKQYCNQTVWFDSTDGTFRPSIDVANESKTDYYDANVCLVTGQYSWFAGHTTGTWNSSPFPLVGLPNTQDYIWVDQNSGMTWLGNDTYLYSCQNQTKGLLYQIFRNLFCSYRLTEAHGKWRCADANITNDKGHGGHPMPAWWVTRSTLTLSVNNSGLFILCGNKVYKEFPPNWSGRCGLGYLAPSVSQYPAFNGSQITGVGSLIHKVAPHRRTQRDVIDPPPVYHNPNSLRALFSRLGTSDLEEAILNISKATEQGLAATVQTSEARQSRVSSLLSALQNHHLDLSAAQQGRTCTIVGNQCCLYVNKSKEVRFLLNSVKERIDSRRRMRELAFNWTDLVSGVRDWFSG

SEQ ID NO: 517 - protein, 463 aa, Pan troglodytes
HLLAPVFRTLSILTNQSNCWLCEHLDNAEQPELVFVPASASTWWTYSGQWMYERMWYPQAEVQNHSTSSYRKVTWHWEASMEAQGLSFAQVRLLEGNFSLCVENKNGSGPFLGNIPKQYCNQILWFDSTDGTFMPSIDVTNESRNDDDDTSVCLGTRQCSWFAGCTNRTWNSSAVPLIGLPNTQDYKWVDRNSGLTWSGNDTCLYSCQNQTKGLLYQLFRNLFCSYGLTEAHGKWRCADANITNDKGHDGHRAPSWWLTGSNLTLSVNNSGLFFLCGNGVYKGFPPKWSGRCGLGYLVPSLTRYLTLNASQITNLRSFIHKVTPHRCTQGDTDNPPLYCNPKDNSTIRALFPSLGTYDLEKAILNISKAMEQEFSATKQTLEAHQSKVSSLASASRKDHVLDIPTTQRQTACGTVGKQCCLYINYSEEIKSNIQRLHEASENLKNVPLLDWQGIFAKVGDWFR

SEQ ID NO: 518 - protein, 463 aa, Gorilla
HLLAPVFRTLSILTNQSNCWLCEHLDNAEQPELVFVPASASTWWTYSGQWMYERVWYPQAEVQNHSTSSYRKVTWHWEASMEAQGLSFAQVRLLEGNFSLCVENKNGSGPFLGNIPKQYCNQILWFDSTDGTFMPSIDVTNESRNDDDDTSVCLGTRQCSWFAGCTNRTWNSSAVPLIGLPNTQDYKWVDRNSGLTWSGNDTCLYSCQNQTKGLLYQLFRNLFCSYGLTEAHGKWRCADANITNDKGHDGHRTPTWWLTGSNLTLSVNNSGLFFLCGNGVYKGFPPKWSGRCGLGYLVPSLTRYLTLNASQITKLRSFIHKVTPHRCTQGDTDNPPLYCNPKDNSTIRALFPSLGTYDLEKAILNISKAMEQEFSATKQTLEAHQSKVSSLASASRKDHVLDIPTTQRQTACGTVGKQCCLYINYSEEIKSNIQRLHEASENLKNVPLLDWQGIFAKVGDWFR

SEQ ID NO: 519 - protein, 463 aa, Pongo
HLLAPVFRTLSILTNQSNCWLCEHLDNAEQPELVFVPSSASTWWTYSGQWMYERVWYPQAEVPNPSTSSYGKVTRHWEASMEAQGLSFAQVRLLEGNFSLCVENKNGTGPFLGNIPKQYCNQILWFDSTDGTFMPSIDVTNESRNDYDDTSVCLGTRQCSWFAGCTNRTWNSSAVPLIGLPNTQDYKWVDRNSGLTWSGNDTCLYSCQNQTKGLLYQLFRNLFCSYGLTEAHGKWRCADANITNDKGHDGHQTPTWWLTGSNLTLSVNNSGLFFLCGNGVYKGFPPKWSGRCGLGYLVPSLTRYLTLNASQITNLRSFIHKVTPHRCTQRDTDDPPLYCNPKDNSTIRALFPSLGTYDLEKAILNISKAMEQEFSATKQTLEAHQSKVSSLASASQKDHVLDIPTTQRQTACGTVGKQCCLYINYSEEIKSNIQRLHEASENLKNIPLLDWEGIFAKVGDWFR

SEQ ID NO: 520 - protein, 463 aa, Hylobates
HLLAPVFRTLSILTNQSNCWLCEHLDNAEQPELVFVPASASTWWTYSGQWVYERVWYPQAEVQNHSTSSYGKVTRHWEASMEAQGLSFAQVRLLEGNLSLCIENKNGTGPFLGNIPKRYCNQILWFDSTDGTFMPSTDVTNESRNDYDDTSVCLGTRQCSWLAGCTNQTWNSSAVPLIGLPNTQDYKWVDRNSGLTWSGNDTCLYSCQNQTKGLLYQLFRNLFCSYGLTEAHGKWRCADVNITNDKGYDGHQTPTWWLTGSNLTLSVNNSGLFFLCGNGVYKGFPPKWSGRCGLGYLVPSLTRYLTLNASQITNLRSFIHKVTPHRCTQRDTDNPPLYCNPKHNSTIRALFPSLGTYDLEKAILNISKAMEQEFSATKQTLEAHQSKVSSLASASRKDHVLDIPTTQRQTACRTVGKQCCLYINHSEEIMSNIQRLREASENLKNVPLLDWEGIFAKVGDWFR

SEQ ID NO: 521 - protein, 463 aa, Macaca
HLLAPVFKTLSILTNQSNCWLCEHLDNAEQPELVFVPASASTWWTHSGQWMYERVWYPQAEVQNHSTSSYGKVTQHWEASMEAQGLSIAQVRLLEGNFSLCVENKNGTGPFLGNIPKQYCNQILWFDFTDGTFMPSIDVTDESRNDYDDTSVCLGTRQCSWFAGCTNQTWNSSAVPLIGLPNTQDYKWVDRNSGLTWSGNGTCLYSCQNQTKGLLYQLFRNLFCSYGLTEAHGKWRCADANITNDKGHDGHQTPTWWLTGSNLTLSVNNSGLFFLCGNGVYKGFPPKWSGRCGLGYLVPSLTRYLTLNASQITNLRSFIHKVTPHRCTQRDTDNPPLYCNPKDNSTIRALFPSLGTYDLEKAILNISKAMEQEISATKQTLEAHQSKVSSLASASQKDHVLDIPTTQRQTACRTVGKQCCLYINNSEAIMSDIQHLYEISENLKNGPFFDWEGLFAKVGDWFR

SEQ ID NO: 522 - protein, 463 aa, Papio anubis
HLLAPVFQTLSILTNQSNCWLCEHLDNAEQPELVFVPASASTWWTYSGQWMYERVWYAQAEVQNHSTSSYGKVTQHWEASMEAQGLSFAQVRLLEGNFSLCVENKNGTGPFLGNIPKQYCNQILWFDFTDGTFMPSIDVTDESRNDYDDTSVCLGTRQCSWFAGCTNQTWNSSAVPLIGLPNTQDYKWVDRNSGLTWSGNGTCLYSCQNQTKGLLYQLFRNLFCSYGLTEAHGKWRCADANITNDKGHDGHQTPTWWLTGSNLTLSVNNSGLFFLCGNGVYKGFPPKWSGRCGLGYLVPSLTRYLTLNASQITNLRSFIHKVTPHRCTQRDTDNPPLYCNPKDNSTIRALFPSLGTYDLEKAILNISKAMEQEISATKQTLEAHQSKVSSLASASQKDHVLDIPTTQRQTACRTVGKQCCLYINNSEAIMSDIQHLYEISENLKNGPFFDWEGLFAKVGDWFR

SEQ ID NO: 523 - protein, 462 aa, Chlorocebus sabeus
HLLAPVFQTLSILTNQSNCWLCEHLDNAEQPELIFVPASASTWWTYSGQWMYERVWYPQAEVQNHSTSSYGKVTRHWEASMEAQGLSFAQVRLLEGNFSLCVENKNGTGPFLGNIPKQYWNQILWFDFTDGTFMPSIDVTDESRNDYDTSVCLGTRQCSWFAGCTNQTWNSSAVPLIGLPNTQDYKWVDRNSGLTWSGNGTCLYSCQNQTKGLLYQLFRNLFCSYGLTEAHGKWRCADANITNDKGHDGHQTPTWWLTGSNLTLSVNNSGLFFLCGNGVYKGFPPKWSGRCGLGYLVPSLTRYLTLNASQITNLRSFIHKVTPHRCTQRDTDNPPLYCNPKDNSTIRALFPSLGTYDLEKAILNISKAMEQEISATKQTLEAHQSKVSSLASASQKDHVLDIPTTQRQTACRTVGKQCCLYINNSEAIMSDIQHLYEISENLKNGPFFDWEGLFAKVGDWFR

SEQ ID NO: 524 - protein, 463 aa, Colobus angolensis palliatus
HLLAPVFRTLSILTNQSNCWLCEHLDNAEQPELVFVPASASTWWTYSGQWMYERVWYPQAEVQNQSTSSYGKATWHWEASMEAQGLSFAQVRLLEGNFSLCVENKNGTGPFLGNIPKQYCNQILWFDFTDGTFMPSIDVTDESRNDYDDTSVCLGTRQCSWFAGCTNQTWNSSAVPLIGLPNTQDYKWVDRNSGLTWSGNGTCLYSCQNQTRGLLYQLFRNLFCSYGLTQAHGKWRCADANITNDKGHDGHQTPTWWLTGSNLTLSVNNSGLFFLCGNGVYKGFPPKWSGRCGLGYLVPSLTRYLTLNASQITNLRSFIHKVTPHRCTQRDTDNPPLYCNPKDNSTIRALFPSLGTYDLEKAILNISKAMEQEISATKQTLEAHQSKVSSLASASQKDHVLDIPTTQRQTACRTVGKQCCLYINNSEAIMSDIQHLYEISENLKNGPLFDWEGLFANVGDWFR

SEQ ID NO: 525 - protein, 463 aa, Semnopithecus entellus
HLLAPVFRTLSILTNQSNCWLCEHLDNAEQPELVFVPASASTWWTYSGQWMYERVWYPQAEVQNHSTSSYGKATWHWEAAMEAQGLSFAQVRLLEGNFSLCVENKNGTGPFLGNIPKQYCNQILWFDFTDGTFMPSIDVTDESRNDYDDTSVCLGTRQCSWFAGCTNQTWNSSAVPLIGLPNTQDYKWVDRNSGLTWSGNGTCLYSCQNQTKGLLYQLFRNLFCSYGLTEAHGKWRCADANITNDKDHDGHQNPTWWLTGSNLTLSVNNSGLFLLCGNGVYKGFPPKWSGRCGLGYLVPSLTRYLTLNASQITNLRSFIHKVTPHRCTQRDTDNSPLYCNPKDNSTVRALFPSLGTYDLEKAILNISKAMEQEISATKQTLEAHQSKVSSLVSASQKDHVLDIPTTQRQTACRTVGKQCCLYINNSEAIMSDIQHLYEISENLKNGPLFDWEGLFAKVGDWFR

SEQ ID NO: 526 - protein, 462 aa, Rhinopithecus roxellana
HLLAPVFRTLSILTNQSNCWLCEHLDNAEQPELVFVPASASTWWTYSGQWMYKRVWYPQAEVQNHSTSSYGKATWHWEAAMEAQGLSFAQVRLLEGNFSLCVENKNGTGPFLGNIPKQYCNQILWFDFTDGTFMPSIDVTDESRNDYDDTSVCLGTRQCSWFAGCTNQTWNSSAVPLIGLPNTQDYKWVDRNSGLTWSGNGTCLYSCQNQTKGLLYQLFRNLFCSYGLTEAHGKWRCADANITNDKGHDGHQTPTWWLTGSNLTLSVNNSGLFLLCGNGVYKGFPPKWSGRCGLGYLVPSLTRYLTLNASQITNLRSFIHKVTPHRCIQRDTDNPPLYCNPKDNSTIRALFPSLGTYLEKAILNISKAMEQEISATKQTLEAHQSKVSSLASASQKDHVLDIPTTQRQTACRTVGKQCCLYINNSEAIMSDIQHLYEISENLKNGPLFDWEGLFAKVGDWFR

SEQ ID NO: 527 - protein, 456 aa, Marmoset
HLLAPVFQTLSILTNQSNCWLCEHLDNAEEPELVFVPASASTWWTSSGRWMYERVWHLQAEVQNHSTSSCDKVTHHWEAFMEAQGLSFAQVRLLEGNFSLCVENKNGTGPFLGNIPKQYCIQTLWFDSTDGTFTPSIDVTEESRNDYDDTSVYLRTRQCPWFVDCTNWTWNSSTIPLIGLPSTQDYQWVDRNSGLTWSGNDTCLYSCQNQTKGLLYQLFRNLFCSYGLQEAHGKWRCADANITNDKGHDGHQTPTWWLTGANLTLSLNNSGLFILCGNGVYKGFPPKWSGRCGLGYLVPSLTRHLTLNTSQITNLRSFIHKVTPRRRTKRDTDSAPLYYNPKDNSTVRALFPSLGTSDLEKAILNLSKAIEQEFGATQPTLEGHQSNVSSLTSASPNDRVLDIPTTQRQTACGTVGKQCCLYINNSEDIMANIQRIKDISKNMKNIPLFDWGDWFT

SEQ ID NO: 528 - protein, 456 aa, Saimiri
HLLAPVFRTLSILTNQSNCWLCEHLDNAEEPELVFVPASASTWWTYSGQWLYERVCHLQAEMQNHSTSSCDKVTQHWEAFMEAQGLSFAQIRLLEGNFSLCVENKNGTGPFLGNIPKQYCTQTLWFDSTDGTFTPSIDITKESRKDYDDTRVYLRTRQRPWFADRINWTWNSSTVPLIGLPSTQNYQWVDRNSGLTWSGNDTCLYSCQNQTKGLLYQLFRNIFCSYGLTEAHGKWRCADANITNDKGHDGHQTPTWWLTGANLTLSVNNSGLFILCGNGVYKGFPPKWSGRCGLGYLVPSLTRYLTLNASQITNLRSFIHKATPHRRTKRDTHNPPLYHNPKDNSTIRALFPSLGTSDLEKAILNLSKAIEQEFGATQPTLEAHQSKGSSLASASPNDRVLDLPTTQRQTACGTVDKQCCLYINNSEDIMSDIQRIKDIAKNMKNIPLFDWGVWFR

SEQ ID NO: 529 - protein, 446 aa, Ateles
HLLAPVFRTLSVLTNQSNCWLCEHLDNAEEPELVFVPASASTWWTHSGQWMYERVWHPQAEVQNHSTSSWDKVTQHWEAFMEAQGLSFAQVKLLEGNFSLCIENKNGTGPFLGNIPKQYCIQTLWFDSTDGTFTPSIDVTKESRNDYDDTSVYLRTNWTWNSSTVPLIGLPGTQDYQWVDRNSGLTWSSNDTCLYSCQNQTKGLLYQLFHNIFCSYGLTEAHGKWGCADANITNDKGHDGHQTPTWWLTGANLTLSVNNSGLFILCGNGVYKGFPPKWSGRCGLGYLVPSLTRYLTLNASQITNLRSFIHKVTLRRRTKRDTDNPPLYYNPKDNSTIKALFPSLGTSDLEKAILNLSKAIDQEFGATQPTLEAHQSKVGSLASASPHDRVLDIPTTQRQTACGTVGKQCCLYINNSEDIMSDIQRIKDISENMKNIPLFDWGDWFI

SEQ ID NO: 530 - protein, 456 aa, Pithecia
HLLAPVFRTLSILTNQSNCWLCEHLDNAEEPELVFVPASASTWWTYSGQWIYQRVWHLQAEVQNHSTSSYDKVTQHWEAFMEAQGLSFAQVRLLEGNFSLCVENKNGTGPFLGNIPKQYCIQTLWFDSTDGTFTPSIDVTKESRNDNDDTSVYLHTRQCPWFADCTNWTWNSSTVPLIGLPSTQDYQWVDRNSGLTWSGNDTCLYSCQNQTKGLLYQLFRNIFCSYGLTEAHGKWRCADANITNDKDQNGHQTPTWWLTVANLTLSVNNSGLFILCGNGVYKGFPPKWSGRCGLGRLVPSLTRYLTLNASQITNLRSFIHKVTPHRRTKRDTDNPPLYYNPKDNSTIRALFPSLGTSDLEKAILNLSKAIEQEFSATQPNLEAHQSKVSSLASASPNDRVLDIPTTQRQTACGTVGKQCCLYINNSEDIMSDIQRIKDISENMKNVPLFDWGDWFR

SEQ ID NO: 531 - protein, 463 aa, Felis catus
YPLPPLFQTLATLANLSDCWLCQHLDNAQEPELVFVPAHASTWWTHSGQWMHKREWYPQTRGHNHSTSSYGRVLWHWETSAEAQGLSLTQVRLLEGNFSVCIENKNGTGPFLGDVPKQYCNQTVWFDSTDGTFRPSIDVANESKTDYYDANVCLVTGQYSWFAGHTTGTWNSSPFPLVGLPNTQDYIWVDQNSGMTWLGNDTYLYSCQNQTKGLLYQIFRNLFCSYRLTEAHGKWRCADANITNDKGHGGHPMPAWWVTRSTLTLSVNNSGLFILCGNKVYKEFPPNWSGRCGLGYLAPSVSQYPAFNGSQITGVGSLIHKVAPHRRTQRDVIDPPPVYHNPNSLRALFSRLGTSDLEEAILNISKATEQGLAATVQTSEARQSRVSSLLSALQNHHLDLSAAQQGRTCTIVGNQCCLYVNKSKEVRFLLNSVKERIDSRRRMRELAFNWTDLVSGVRDWFSG

SEQ ID NO: 532 - protein, 465 aa, Pan troglodytes
LLAPVFRTLSILTNQSNCWLCEHLDNAEQPELVFVPASASTWWTYSGQWMYERMWYPQAEVQNHSTSSYRKVTWHWEASMEAQGLSFAQVRLLEGNFSLCVENKNGSGPFLGNIPKQYCNQILWFDSTDGTFMPSIDVTNESRNDDDDTSVCLGTRQCSWFAGCTNRTWNSSAVPLIGLPNTQDYKWVDRNSGLTWSGNDTCLYSCQNQTKGLLYQLFRNLFCSYGLTEAHGKWRCADANITNDKGHDGHRAPSWWLTGSNLTLSVNNSGLFFLCGNGVYKGFPPKWSGRCGLGYLVPSLTRYLTLNASQITNLRSFIHKVTPHRCTQGDTDNPPLYCNPKDNSTIRALFPSLGTYDLEKAILNISKAMEQEFSATKQTLEAHQSKVSSLASASRKDHVLDIPTTQRQTACGTVGKQCCLYINYSEEIKSNIQRLHEASENLKNVPLLDWQGIFAKVGDWFRSWG

SEQ ID NO: 533 - protein, 465 aa, Gorilla
LLAPVFRTLSILTNQSNCWLCEHLDNAEQPELVFVPASASTWWTYSGQWMYERVWYPQAEVQNHSTSSYRKVTWHWEASMEAQGLSFAQVRLLEGNFSLCVENKNGSGPFLGNIPKQYCNQILWFDSTDGTFMPSIDVTNESRNDDDDTSVCLGTRQCSWFAGCTNRTWNSSAVPLIGLPNTQDYKWVDRNSGLTWSGNDTCLYSCQNQTKGLLYQLFRNLFCSYGLTEAHGKWRCADANITNDKGHDGHRTPTWWLTGSNLTLSVNNSGLFFLCGNGVYKGFPPKWSGRCGLGYLVPSLTRYLTLNASQITKLRSFIHKVTPHRCTQGDTDNPPLYCNPKDNSTIRALFPSLGTYDLEKAILNISKAMEQEFSATKQTLEAHQSKVSSLASASRKDHVLDIPTTQRQTACGTVGKQCCLYINYSEEIKSNIQRLHEASENLKNVPLLDWQGIFAKVGDWFRSWG

SEQ ID NO: 534 - protein, 465 aa, Pongo
LLAPVFRTLSILTNQSNCWLCEHLDNAEQPELVFVPSSASTWWTYSGQWMYERVWYPQAEVPNPSTSSYGKVTRHWEASMEAQGLSFAQVRLLEGNFSLCVENKNGTGPFLGNIPKQYCNQILWFDSTDGTFMPSIDVTNESRNDYDDTSVCLGTRQCSWFAGCTNRTWNSSAVPLIGLPNTQDYKWVDRNSGLTWSGNDTCLYSCQNQTKGLLYQLFRNLFCSYGLTEAHGKWRCADANITNDKGHDGHQTPTWWLTGSNLTLSVNNSGLFFLCGNGVYKGFPPKWSGRCGLGYLVPSLTRYLTLNASQITNLRSFIHKVTPHRCTQRDTDDPPLYCNPKDNSTIRALFPSLGTYDLEKAILNISKAMEQEFSATKQTLEAHQSKVSSLASASQKDHVLDIPTTQRQTACGTVGKQCCLYINYSEEIKSNIQRLHEASENLKNIPLLDWEGIFAKVGDWFRSWG

SEQ ID NO: 535 - protein, 465 aa, Hylobates
LLAPVFRTLSILTNQSNCWLCEHLDNAEQPELVFVPASASTWWTYSGQWVYERVWYPQAEVQNHSTSSYGKVTRHWEASMEAQGLSFAQVRLLEGNLSLCIENKNGTGPFLGNIPKRYCNQILWFDSTDGTFMPSTDVTNESRNDYDDTSVCLGTRQCSWLAGCTNQTWNSSAVPLIGLPNTQDYKWVDRNSGLTWSGNDTCLYSCQNQTKGLLYQLFRNLFCSYGLTEAHGKWRCADVNITNDKGYDGHQTPTWWLTGSNLTLSVNNSGLFFLCGNGVYKGFPPKWSGRCGLGYLVPSLTRYLTLNASQITNLRSFIHKVTPHRCTQRDTDNPPLYCNPKHNSTIRALFPSLGTYDLEKAILNISKAMEQEFSATKQTLEAHQSKVSSLASASRKDHVLDIPTTQRQTACRTVGKQCCLYINHSEEIMSNIQRLREASENLKNVPLLDWEGIFAKVGDWFRSWG

SEQ ID NO: 536 - protein, 465 aa, Macaca
LLAPVFKTLSILTNQSNCWLCEHLDNAEQPELVFVPASASTWWTHSGQWMYERVWYPQAEVQNHSTSSYGKVTQHWEASMEAQGLSIAQVRLLEGNFSLCVENKNGTGPFLGNIPKQYCNQILWFDFTDGTFMPSIDVTDESRNDYDDTSVCLGTRQCSWFAGCTNQTWNSSAVPLIGLPNTQDYKWVDRNSGLTWSGNGTCLYSCQNQTKGLLYQLFRNLFCSYGLTEAHGKWRCADANITNDKGHDGHQTPTWWLTGSNLTLSVNNSGLFFLCGNGVYKGFPPKWSGRCGLGYLVPSLTRYLTLNASQITNLRSFIHKVTPHRCTQRDTDNPPLYCNPKDNSTIRALFPSLGTYDLEKAILNISKAMEQEISATKQTLEAHQSKVSSLASASQKDHVLDIPTTQRQTACRTVGKQCCLYINNSEAIMSDIQHLYEISENLKNGPFFDWEGLFAKVGDWFRSWG

SEQ ID NO: 537 - protein, 465 aa, Papio anubis
LLAPVFQTLSILTNQSNCWLCEHLDNAEQPELVFVPASASTWWTYSGQWMYERVWYAQAEVQNHSTSSYGKVTQHWEASMEAQGLSFAQVRLLEGNFSLCVENKNGTGPFLGNIPKQYCNQILWFDFTDGTFMPSIDVTDESRNDYDDTSVCLGTRQCSWFAGCTNQTWNSSAVPLIGLPNTQDYKWVDRNSGLTWSGNGTCLYSCQNQTKGLLYQLFRNLFCSYGLTEAHGKWRCADANITNDKGHDGHQTPTWWLTGSNLTLSVNNSGLFFLCGNGVYKGFPPKWSGRCGLGYLVPSLTRYLTLNASQITNLRSFIHKVTPHRCTQRDTDNPPLYCNPKDNSTIRALFPSLGTYDLEKAILNISKAMEQEISATKQTLEAHQSKVSSLASASQKDHVLDIPTTQRQTACRTVGKQCCLYINNSEAIMSDIQHLYEISENLKNGPFFDWEGLFAKVGDWFRSWG

SEQ ID NO: 538 - protein, 464 aa, Chlorocebus sabeus
LLAPVFQTLSILTNQSNCWLCEHLDNAEQPELIFVPASASTWWTYSGQWMYERVWYPQAEVQNHSTSSYGKVTRHWEASMEAQGLSFAQVRLLEGNFSLCVENKNGTGPFLGNIPKQYWNQILWFDFTDGTFMPSIDVTDESRNDYDTSVCLGTRQCSWFAGCTNQTWNSSAVPLIGLPNTQDYKWVDRNSGLTWSGNGTCLYSCQNQTKGLLYQLFRNLFCSYGLTEAHGKWRCADANITNDKGHDGHQTPTWWLTGSNLTLSVNNSGLFFLCGNGVYKGFPPKWSGRCGLGYLVPSLTRYLTLNASQITNLRSFIHKVTPHRCTQRDTDNPPLYCNPKDNSTIRALFPSLGTYDLEKAILNISKAMEQEISATKQTLEAHQSKVSSLASASQKDHVLDIPTTQRQTACRTVGKQCCLYINNSEAIMSDIQHLYEISENLKNGPFFDWEGLFAKVGDWFRSWG

SEQ ID NO: 539 - protein, 465 aa, Colobus angolensis palliatus
LLAPVFRTLSILTNQSNCWLCEHLDNAEQPELVFVPASASTWWTYSGQWMYERVWYPQAEVQNQSTSSYGKATWHWEASMEAQGLSFAQVRLLEGNFSLCVENKNGTGPFLGNIPKQYCNQILWFDFTDGTFMPSIDVTDESRNDYDDTSVCLGTRQCSWFAGCTNQTWNSSAVPLIGLPNTQDYKWVDRNSGLTWSGNGTCLYSCQNQTRGLLYQLFRNLFCSYGLTQAHGKWRCADANITNDKGHDGHQTPTWWLTGSNLTLSVNNSGLFFLCGNGVYKGFPPKWSGRCGLGYLVPSLTRYLTLNASQITNLRSFIHKVTPHRCTQRDTDNPPLYCNPKDNSTIRALFPSLGTYDLEKAILNISKAMEQEISATKQTLEAHQSKVSSLASASQKDHVLDIPTTQRQTACRTVGKQCCLYINNSEAIMSDIQHLYEISENLKNGPLFDWEGLFANVGDWFRSWG

SEQ ID NO: 540 - protein, 465 aa, Semnopithecus entellus
LLAPVFRTLSILTNQSNCWLCEHLDNAEQPELVFVPASASTWWTYSGQWMYERVWYPQAEVQNHSTSSYGKATWHWEAAMEAQGLSFAQVRLLEGNFSLCVENKNGTGPFLGNIPKQYCNQILWFDFTDGTFMPSIDVTDESRNDYDDTSVCLGTRQCSWFAGCTNQTWNSSAVPLIGLPNTQDYKWVDRNSGLTWSGNGTCLYSCQNQTKGLLYQLFRNLFCSYGLTEAHGKWRCADANITNDKDHDGHQNPTWWLTGSNLTLSVNNSGLFLLCGNGVYKGFPPKWSGRCGLGYLVPSLTRYLTLNASQITNLRSFIHKVTPHRCTQRDTDNSPLYCNPKDNSTVRALFPSLGTYDLEKAILNISKAMEQEISATKQTLEAHQSKVSSLVSASQKDHVLDIPTTQRQTACRTVGKQCCLYINNSEAIMSDIQHLYEISENLKNGPLFDWEGLFAKVGDWFRSWG

SEQ ID NO: 541 - protein, 464 aa, Rhinopithecus roxellana
LLAPVFRTLSILTNQSNCWLCEHLDNAEQPELVFVPASASTWWTYSGQWMYKRVWYPQAEVQNHSTSSYGKATWHWEAAMEAQGLSFAQVRLLEGNFSLCVENKNGTGPFLGNIPKQYCNQILWFDFTDGTFMPSIDVTDESRNDYDDTSVCLGTRQCSWFAGCTNQTWNSSAVPLIGLPNTQDYKWVDRNSGLTWSGNGTCLYSCQNQTKGLLYQLFRNLFCSYGLTEAHGKWRCADANITNDKGHDGHQTPTWWLTGSNLTLSVNNSGLFLLCGNGVYKGFPPKWSGRCGLGYLVPSLTRYLTLNASQITNLRSFIHKVTPHRCIQRDTDNPPLYCNPKDNSTIRALFPSLGTYLEKAILNISKAMEQEISATKQTLEAHQSKVSSLASASQKDHVLDIPTTQRQTACRTVGKQCCLYINNSEAIMSDIQHLYEISENLKNGPLFDWEGLFAKVGDWFRSWG

SEQ ID NO: 542 - protein, 458 aa, Marmoset
LLAPVFQTLSILTNQSNCWLCEHLDNAEEPELVFVPASASTWWTSSGRWMYERVWHLQAEVQNHSTSSCDKVTHHWEAFMEAQGLSFAQVRLLEGNFSLCVENKNGTGPFLGNIPKQYCIQTLWFDSTDGTFTPSIDVTEESRNDYDDTSVYLRTRQCPWFVDCTNWTWNSSTIPLIGLPSTQDYQWVDRNSGLTWSGNDTCLYSCQNQTKGLLYQLFRNLFCSYGLQEAHGKWRCADANITNDKGHDGHQTPTWWLTGANLTLSLNNSGLFILCGNGVYKGFPPKWSGRCGLGYLVPSLTRHLTLNTSQITNLRSFIHKVTPRRRTKRDTDSAPLYYNPKDNSTVRALFPSLGTSDLEKAILNLSKAIEQEFGATQPTLEGHQSNVSSLTSASPNDRVLDIPTTQRQTACGTVGKQCCLYINNSEDIMANIQRIKDISKNMKNIPLFDWGDWFTSWG

SEQ ID NO: 543 - protein, 458 aa, Saimiri
LLAPVFRTLSILTNQSNCWLCEHLDNAEEPELVFVPASASTWWTYSGQWLYERVCHLQAEMQNHSTSSCDKVTQHWEAFMEAQGLSFAQIRLLEGNFSLCVENKNGTGPFLGNIPKQYCTQTLWFDSTDGTFTPSIDITKESRKDYDDTRVYLRTRQRPWFADRINWTWNSSTVPLIGLPSTQNYQWVDRNSGLTWSGNDTCLYSCQNQTKGLLYQLFRNIFCSYGLTEAHGKWRCADANITNDKGHDGHQTPTWWLTGANLTLSVNNSGLFILCGNGVYKGFPPKWSGRCGLGYLVPSLTRYLTLNASQITNLRSFIHKATPHRRTKRDTHNPPLYHNPKDNSTIRALFPSLGTSDLEKAILNLSKAIEQEFGATQPTLEAHQSKGSSLASASPNDRVLDLPTTQRQTACGTVDKQCCLYINNSEDIMSDIQRIKDIAKNMKNIPLFDWGVWFRSWG

SEQ ID NO: 544 - protein, 448 aa, Ateles
LLAPVFRTLSVLTNQSNCWLCEHLDNAEEPELVFVPASASTWWTHSGQWMYERVWHPQAEVQNHSTSSWDKVTQHWEAFMEAQGLSFAQVKLLEGNFSLCIENKNGTGPFLGNIPKQYCIQTLWFDSTDGTFTPSIDVTKESRNDYDDTSVYLRTNWTWNSSTVPLIGLPGTQDYQWVDRNSGLTWSSNDTCLYSCQNQTKGLLYQLFHNIFCSYGLTEAHGKWGCADANITNDKGHDGHQTPTWWLTGANLTLSVNNSGLFILCGNGVYKGFPPKWSGRCGLGYLVPSLTRYLTLNASQITNLRSFIHKVTLRRRTKRDTDNPPLYYNPKDNSTIKALFPSLGTSDLEKAILNLSKAIDQEFGATQPTLEAHQSKVGSLASASPHDRVLDIPTTQRQTACGTVGKQCCLYINNSEDIMSDIQRIKDISENMKNIPLFDWGDWFISWG

SEQ ID NO: 545 - protein, 458 aa, Pithecia
LLAPVFRTLSILTNQSNCWLCEHLDNAEEPELVFVPASASTWWTYSGQWIYQRVWHLQAEVQNHSTSSYDKVTQHWEAFMEAQGLSFAQVRLLEGNFSLCVENKNGTGPFLGNIPKQYCIQTLWFDSTDGTFTPSIDVTKESRNDNDDTSVYLHTRQCPWFADCTNWTWNSSTVPLIGLPSTQDYQWVDRNSGLTWSGNDTCLYSCQNQTKGLLYQLFRNIFCSYGLTEAHGKWRCADANITNDKDQNGHQTPTWWLTVANLTLSVNNSGLFILCGNGVYKGFPPKWSGRCGLGRLVPSLTRYLTLNASQITNLRSFIHKVTPHRRTKRDTDNPPLYYNPKDNSTIRALFPSLGTSDLEKAILNLSKAIEQEFSATQPNLEAHQSKVSSLASASPNDRVLDIPTTQRQTACGTVGKQCCLYINNSEDIMSDIQRIKDISENMKNVPLFDWGDWFRSWG

SEQ ID NO: 546 - protein, 465 aa, Felis catus
PLPPLFQTLATLANLSDCWLCQHLDNAQEPELVFVPAHASTWWTHSGQWMHKREWYPQTRGHNHSTSSYGRVLWHWETSAEAQGLSLTQVRLLEGNFSVCIENKNGTGPFLGDVPKQYCNQTVWFDSTDGTFRPSIDVANESKTDYYDANVCLVTGQYSWFAGHTTGTWNSSPFPLVGLPNTQDYIWVDQNSGMTWLGNDTYLYSCQNQTKGLLYQIFRNLFCSYRLTEAHGKWRCADANITNDKGHGGHPMPAWWVTRSTLTLSVNNSGLFILCGNKVYKEFPPNWSGRCGLGYLAPSVSQYPAFNGSQITGVGSLIHKVAPHRRTQRDVIDPPPVYHNPNSLRALFSRLGTSDLEEAILNISKATEQGLAATVQTSEARQSRVSSLLSALQNHHLDLSAAQQGRTCTIVGNQCCLYVNKSKEVRFLLNSVKERIDSRRRMRELAFNWTDLVSGVRDWFSGHWG

SEQ ID NO: 547 - protein, 467 aa, Pan troglodytes
QHLLAPVFRTLSILTNQSNCWLCEHLDNAEQPELVFVPASASTWWTYSGQWMYERMWYPQAEVQNHSTSSYRKVTWHWEASMEAQGLSFAQVRLLEGNFSLCVENKNGSGPFLGNIPKQYCNQILWFDSTDGTFMPSIDVTNESRNDDDDTSVCLGTRQCSWFAGCTNRTWNSSAVPLIGLPNTQDYKWVDRNSGLTWSGNDTCLYSCQNQTKGLLYQLFRNLFCSYGLTEAHGKWRCADANITNDKGHDGHRAPSWWLTGSNLTLSVNNSGLFFLCGNGVYKGFPPKWSGRCGLGYLVPSLTRYLTLNASQITNLRSFIHKVTPHRCTQGDTDNPPLYCNPKDNSTIRALFPSLGTYDLEKAILNISKAMEQEFSATKQTLEAHQSKVSSLASASRKDHVLDIPTTQRQTACGTVGKQCCLYINYSEEIKSNIQRLHEASENLKNVPLLDWQGIFAKVGDWFRSWG

SEQ ID NO: 548 - protein, 467 aa, Gorilla
QHLLAPVFRTLSILTNQSNCWLCEHLDNAEQPELVFVPASASTWWTYSGQWMYERVWYPQAEVQNHSTSSYRKVTWHWEASMEAQGLSFAQVRLLEGNFSLCVENKNGSGPFLGNIPKQYCNQILWFDSTDGTFMPSIDVTNESRNDDDDTSVCLGTRQCSWFAGCTNRTWNSSAVPLIGLPNTQDYKWVDRNSGLTWSGNDTCLYSCQNQTKGLLYQLFRNLFCSYGLTEAHGKWRCADANITNDKGHDGHRTPTWWLTGSNLTLSVNNSGLFFLCGNGVYKGFPPKWSGRCGLGYLVPSLTRYLTLNASQITKLRSFIHKVTPHRCTQGDTDNPPLYCNPKDNSTIRALFPSLGTYDLEKAILNISKAMEQEFSATKQTLEAHQSKVSSLASASRKDHVLDIPTTQRQTACGTVGKQCCLYINYSEEIKSNIQRLHEASENLKNVPLLDWQGIFAKVGDWFRSWG

SEQ ID NO: 549 - protein, 467 aa, Pongo
QHLLAPVFRTLSILTNQSNCWLCEHLDNAEQPELVFVPSSASTWWTYSGQWMYERVWYPQAEVPNPSTSSYGKVTRHWEASMEAQGLSFAQVRLLEGNFSLCVENKNGTGPFLGNIPKQYCNQILWFDSTDGTFMPSIDVTNESRNDYDDTSVCLGTRQCSWFAGCTNRTWNSSAVPLIGLPNTQDYKWVDRNSGLTWSGNDTCLYSCQNQTKGLLYQLFRNLFCSYGLTEAHGKWRCADANITNDKGHDGHQTPTWWLTGSNLTLSVNNSGLFFLCGNGVYKGFPPKWSGRCGLGYLVPSLTRYLTLNASQITNLRSFIHKVTPHRCTQRDTDDPPLYCNPKDNSTIRALFPSLGTYDLEKAILNISKAMEQEFSATKQTLEAHQSKVSSLASASQKDHVLDIPTTQRQTACGTVGKQCCLYINYSEEIKSNIQRLHEASENLKNIPLLDWEGIFAKVGDWFRSWG

SEQ ID NO: 550 - protein, 467 aa, Hylobates
QHLLAPVFRTLSILTNQSNCWLCEHLDNAEQPELVFVPASASTWWTYSGQWVYERVWYPQAEVQNHSTSSYGKVTRHWEASMEAQGLSFAQVRLLEGNLSLCIENKNGTGPFLGNIPKRYCNQILWFDSTDGTFMPSTDVTNESRNDYDDTSVCLGTRQCSWLAGCTNQTWNSSAVPLIGLPNTQDYKWVDRNSGLTWSGNDTCLYSCQNQTKGLLYQLFRNLFCSYGLTEAHGKWRCADVNITNDKGYDGHQTPTWWLTGSNLTLSVNNSGLFFLCGNGVYKGFPPKWSGRCGLGYLVPSLTRYLTLNASQITNLRSFIHKVTPHRCTQRDTDNPPLYCNPKHNSTIRALFPSLGTYDLEKAILNISKAMEQEFSATKQTLEAHQSKVSSLASASRKDHVLDIPTTQRQTACRTVGKQCCLYINHSEEIMSNIQRLREASENLKNVPLLDWEGIFAKVGDWFRSWG

SEQ ID NO: 551 - protein, 467 aa, Macaca
QHLLAPVFKTLSILTNQSNCWLCEHLDNAEQPELVFVPASASTWWTHSGQWMYERVWYPQAEVQNHSTSSYGKVTQHWEASMEAQGLSIAQVRLLEGNFSLCVENKNGTGPFLGNIPKQYCNQILWFDFTDGTFMPSIDVTDESRNDYDDTSVCLGTRQCSWFAGCTNQTWNSSAVPLIGLPNTQDYKWVDRNSGLTWSGNGTCLYSCQNQTKGLLYQLFRNLFCSYGLTEAHGKWRCADANITNDKGHDGHQTPTWWLTGSNLTLSVNNSGLFFLCGNGVYKGFPPKWSGRCGLGYLVPSLTRYLTLNASQITNLRSFIHKVTPHRCTQRDTDNPPLYCNPKDNSTIRALFPSLGTYDLEKAILNISKAMEQEISATKQTLEAHQSKVSSLASASQKDHVLDIPTTQRQTACRTVGKQCCLYINNSEAIMSDIQHLYEISENLKNGPFFDWEGLFAKVGDWFRSWG

SEQ ID NO: 552 - protein, 467 aa, Papio anubis
QHLLAPVFQTLSILTNQSNCWLCEHLDNAEQPELVFVPASASTWWTYSGQWMYERVWYAQAEVQNHSTSSYGKVTQHWEASMEAQGLSFAQVRLLEGNFSLCVENKNGTGPFLGNIPKQYCNQILWFDFTDGTFMPSIDVTDESRNDYDDTSVCLGTRQCSWFAGCTNQTWNSSAVPLIGLPNTQDYKWVDRNSGLTWSGNGTCLYSCQNQTKGLLYQLFRNLFCSYGLTEAHGKWRCADANITNDKGHDGHQTPTWWLTGSNLTLSVNNSGLFFLCGNGVYKGFPPKWSGRCGLGYLVPSLTRYLTLNASQITNLRSFIHKVTPHRCTQRDTDNPPLYCNPKDNSTIRALFPSLGTYDLEKAILNISKAMEQEISATKQTLEAHQSKVSSLASASQKDHVLDIPTTQRQTACRTVGKQCCLYINNSEAIMSDIQHLYEISENLKNGPFFDWEGLFAKVGDWFRSWG

SEQ ID NO: 553 - protein, 466 aa, Chlorocebus sabeus
QHLLAPVFQTLSILTNQSNCWLCEHLDNAEQPELIFVPASASTWWTYSGQWMYERVWYPQAEVQNHSTSSYGKVTRHWEASMEAQGLSFAQVRLLEGNFSLCVENKNGTGPFLGNIPKQYWNQILWFDFTDGTFMPSIDVTDESRNDYDTSVCLGTRQCSWFAGCTNQTWNSSAVPLIGLPNTQDYKWVDRNSGLTWSGNGTCLYSCQNQTKGLLYQLFRNLFCSYGLTEAHGKWRCADANITNDKGHDGHQTPTWWLTGSNLTLSVNNSGLFFLCGNGVYKGFPPKWSGRCGLGYLVPSLTRYLTLNASQITNLRSFIHKVTPHRCTQRDTDNPPLYCNPKDNSTIRALFPSLGTYDLEKAILNISKAMEQEISATKQTLEAHQSKVSSLASASQKDHVLDIPTTQRQTACRTVGKQCCLYINNSEAIMSDIQHLYEISENLKNGPFFDWEGLFAKVGDWFRSWG

SEQ ID NO: 554 - protein, 467 aa, Colobus angolensis palliatus
QHLLAPVFRTLSILTNQSNCWLCEHLDNAEQPELVFVPASASTWWTYSGQWMYERVWYPQAEVQNQSTSSYGKATWHWEASMEAQGLSFAQVRLLEGNFSLCVENKNGTGPFLGNIPKQYCNQILWFDFTDGTFMPSIDVTDESRNDYDDTSVCLGTRQCSWFAGCTNQTWNSSAVPLIGLPNTQDYKWVDRNSGLTWSGNGTCLYSCQNQTRGLLYQLFRNLFCSYGLTQAHGKWRCADANITNDKGHDGHQTPTWWLTGSNLTLSVNNSGLFFLCGNGVYKGFPPKWSGRCGLGYLVPSLTRYLTLNASQITNLRSFIHKVTPHRCTQRDTDNPPLYCNPKDNSTIRALFPSLGTYDLEKAILNISKAMEQEISATKQTLEAHQSKVSSLASASQKDHVLDIPTTQRQTACRTVGKQCCLYINNSEAIMSDIQHLYEISENLKNGPLFDWEGLFANVGDWFRSWG

SEQ ID NO: 555 - protein, 467 aa, Semnopithecus entellus
QHLLAPVFRTLSILTNQSNCWLCEHLDNAEQPELVFVPASASTWWTYSGQWMYERVWYPQAEVQNHSTSSYGKATWHWEAAMEAQGLSFAQVRLLEGNFSLCVENKNGTGPFLGNIPKQYCNQILWFDFTDGTFMPSIDVTDESRNDYDDTSVCLGTRQCSWFAGCTNQTWNSSAVPLIGLPNTQDYKWVDRNSGLTWSGNGTCLYSCQNQTKGLLYQLFRNLFCSYGLTEAHGKWRCADANITNDKDHDGHQNPTWWLTGSNLTLSVNNSGLFLLCGNGVYKGFPPKWSGRCGLGYLVPSLTRYLTLNASQITNLRSFIHKVTPHRCTQRDTDNSPLYCNPKDNSTVRALFPSLGTYDLEKAILNISKAMEQEISATKQTLEAHQSKVSSLVSASQKDHVLDIPTTQRQTACRTVGKQCCLYINNSEAIMSDIQHLYEISENLKNGPLFDWEGLFAKVGDWFRSWG

SEQ ID NO: 556 - protein, 466 aa, Rhinopithecus roxellana
QHLLAPVFRTLSILTNQSNCWLCEHLDNAEQPELVFVPASASTWWTYSGQWMYKRVWYPQAEVQNHSTSSYGKATWHWEAAMEAQGLSFAQVRLLEGNFSLCVENKNGTGPFLGNIPKQYCNQILWFDFTDGTFMPSIDVTDESRNDYDDTSVCLGTRQCSWFAGCTNQTWNSSAVPLIGLPNTQDYKWVDRNSGLTWSGNGTCLYSCQNQTKGLLYQLFRNLFCSYGLTEAHGKWRCADANITNDKGHDGHQTPTWWLTGSNLTLSVNNSGLFLLCGNGVYKGFPPKWSGRCGLGYLVPSLTRYLTLNASQITNLRSFIHKVTPHRCIQRDTDNPPLYCNPKDNSTIRALFPSLGTYLEKAILNISKAMEQEISATKQTLEAHQSKVSSLASASQKDHVLDIPTTQRQTACRTVGKQCCLYINNSEAIMSDIQHLYEISENLKNGPLFDWEGLFAKVGDWFRSWG

SEQ ID NO: 557 - protein, 460 aa, Marmoset
QHLLAPVFQTLSILTNQSNCWLCEHLDNAEEPELVFVPASASTWWTSSGRWMYERVWHLQAEVQNHSTSSCDKVTHHWEAFMEAQGLSFAQVRLLEGNFSLCVENKNGTGPFLGNIPKQYCIQTLWFDSTDGTFTPSIDVTEESRNDYDDTSVYLRTRQCPWFVDCTNWTWNSSTIPLIGLPSTQDYQWVDRNSGLTWSGNDTCLYSCQNQTKGLLYQLFRNLFCSYGLQEAHGKWRCADANITNDKGHDGHQTPTWWLTGANLTLSLNNSGLFILCGNGVYKGFPPKWSGRCGLGYLVPSLTRHLTLNTSQITNLRSFIHKVTPRRRTKRDTDSAPLYYNPKDNSTVRALFPSLGTSDLEKAILNLSKAIEQEFGATQPTLEGHQSNVSSLTSASPNDRVLDIPTTQRQTACGTVGKQCCLYINNSEDIMANIQRIKDISKNMKNIPLFDWGDWFTSWG

SEQ ID NO: 558 - protein, 460 aa, Saimiri
QHLLAPVFRTLSILTNQSNCWLCEHLDNAEEPELVFVPASASTWWTYSGQWLYERVCHLQAEMQNHSTSSCDKVTQHWEAFMEAQGLSFAQIRLLEGNFSLCVENKNGTGPFLGNIPKQYCTQTLWFDSTDGTFTPSIDITKESRKDYDDTRVYLRTRQRPWFADRINWTWNSSTVPLIGLPSTQNYQWVDRNSGLTWSGNDTCLYSCQNQTKGLLYQLFRNIFCSYGLTEAHGKWRCADANITNDKGHDGHQTPTWWLTGANLTLSVNNSGLFILCGNGVYKGFPPKWSGRCGLGYLVPSLTRYLTLNASQITNLRSFIHKATPHRRTKRDTHNPPLYHNPKDNSTIRALFPSLGTSDLEKAILNLSKAIEQEFGATQPTLEAHQSKGSSLASASPNDRVLDLPTTQRQTACGTVDKQCCLYINNSEDIMSDIQRIKDIAKNMKNIPLFDWGVWFRSWG

SEQ ID NO: 559 - protein, 450 aa, Ateles
QHLLAPVFRTLSVLTNQSNCWLCEHLDNAEEPELVFVPASASTWWTHSGQWMYERVWHPQAEVQNHSTSSWDKVTQHWEAFMEAQGLSFAQVKLLEGNFSLCIENKNGTGPFLGNIPKQYCIQTLWFDSTDGTFTPSIDVTKESRNDYDDTSVYLRTNWTWNSSTVPLIGLPGTQDYQWVDRNSGLTWSSNDTCLYSCQNQTKGLLYQLFHNIFCSYGLTEAHGKWGCADANITNDKGHDGHQTPTWWLTGANLTLSVNNSGLFILCGNGVYKGFPPKWSGRCGLGYLVPSLTRYLTLNASQITNLRSFIHKVTLRRRTKRDTDNPPLYYNPKDNSTIKALFPSLGTSDLEKAILNLSKAIDQEFGATQPTLEAHQSKVGSLASASPHDRVLDIPTTQRQTACGTVGKQCCLYINNSEDIMSDIQRIKDISENMKNIPLFDWGDWFISWG

SEQ ID NO: 560 - protein, 460 aa, Pithecia
QHLLAPVFRTLSILTNQSNCWLCEHLDNAEEPELVFVPASASTWWTYSGQWIYQRVWHLQAEVQNHSTSSYDKVTQHWEAFMEAQGLSFAQVRLLEGNFSLCVENKNGTGPFLGNIPKQYCIQTLWFDSTDGTFTPSIDVTKESRNDNDDTSVYLHTRQCPWFADCTNWTWNSSTVPLIGLPSTQDYQWVDRNSGLTWSGNDTCLYSCQNQTKGLLYQLFRNIFCSYGLTEAHGKWRCADANITNDKDQNGHQTPTWWLTVANLTLSVNNSGLFILCGNGVYKGFPPKWSGRCGLGRLVPSLTRYLTLNASQITNLRSFIHKVTPHRRTKRDTDNPPLYYNPKDNSTIRALFPSLGTSDLEKAILNLSKAIEQEFSATQPNLEAHQSKVSSLASASPNDRVLDIPTTQRQTACGTVGKQCCLYINNSEDIMSDIQRIKDISENMKNVPLFDWGDWFRSWG

SEQ ID NO: 561 - protein, 467 aa, Felis catus
RYPLPPLFQTLATLANLSDCWLCQHLDNAQEPELVFVPAHASTWWTHSGQWMHKREWYPQTRGHNHSTSSYGRVLWHWETSAEAQGLSLTQVRLLEGNFSVCIENKNGTGPFLGDVPKQYCNQTVWFDSTDGTFRPSIDVANESKTDYYDANVCLVTGQYSWFAGHTTGTWNSSPFPLVGLPNTQDYIWVDQNSGMTWLGNDTYLYSCQNQTKGLLYQIFRNLFCSYRLTEAHGKWRCADANITNDKGHGGHPMPAWWVTRSTLTLSVNNSGLFILCGNKVYKEFPPNWSGRCGLGYLAPSVSQYPAFNGSQITGVGSLIHKVAPHRRTQRDVIDPPPVYHNPNSLRALFSRLGTSDLEEAILNISKATEQGLAATVQTSEARQSRVSSLLSALQNHHLDLSAAQQGRTCTIVGNQCCLYVNKSKEVRFLLNSVKERIDSRRRMRELAFNWTDLVSGVRDWFSGHWG

SEQ ID NO: 562 - protein, 466 aa, Pan troglodytes
HLLAPVFRTLSILTNQSNCWLCEHLDNAEQPELVFVPASASTWWTYSGQWMYERMWYPQAEVQNHSTSSYRKVTWHWEASMEAQGLSFAQVRLLEGNFSLCVENKNGSGPFLGNIPKQYCNQILWFDSTDGTFMPSIDVTNESRNDDDDTSVCLGTRQCSWFAGCTNRTWNSSAVPLIGLPNTQDYKWVDRNSGLTWSGNDTCLYSCQNQTKGLLYQLFRNLFCSYGLTEAHGKWRCADANITNDKGHDGHRAPSWWLTGSNLTLSVNNSGLFFLCGNGVYKGFPPKWSGRCGLGYLVPSLTRYLTLNASQITNLRSFIHKVTPHRCTQGDTDNPPLYCNPKDNSTIRALFPSLGTYDLEKAILNISKAMEQEFSATKQTLEAHQSKVSSLASASRKDHVLDIPTTQRQTACGTVGKQCCLYINYSEEIKSNIQRLHEASENLKNVPLLDWQGIFAKVGDWFRSWG

SEQ ID NO: 563 - protein, 466 aa, Gorilla
HLLAPVFRTLSILTNQSNCWLCEHLDNAEQPELVFVPASASTWWTYSGQWMYERVWYPQAEVQNHSTSSYRKVTWHWEASMEAQGLSFAQVRLLEGNFSLCVENKNGSGPFLGNIPKQYCNQILWFDSTDGTFMPSIDVTNESRNDDDDTSVCLGTRQCSWFAGCTNRTWNSSAVPLIGLPNTQDYKWVDRNSGLTWSGNDTCLYSCQNQTKGLLYQLFRNLFCSYGLTEAHGKWRCADANITNDKGHDGHRTPTWWLTGSNLTLSVNNSGLFFLCGNGVYKGFPPKWSGRCGLGYLVPSLTRYLTLNASQITKLRSFIHKVTPHRCTQGDTDNPPLYCNPKDNSTIRALFPSLGTYDLEKAILNISKAMEQEFSATKQTLEAHQSKVSSLASASRKDHVLDIPTTQRQTACGTVGKQCCLYINYSEEIKSNIQRLHEASENLKNVPLLDWQGIFAKVGDWFRSWG

SEQ ID NO: 564 - protein, 466 aa, Pongo
HLLAPVFRTLSILTNQSNCWLCEHLDNAEQPELVFVPSSASTWWTYSGQWMYERVWYPQAEVPNPSTSSYGKVTRHWEASMEAQGLSFAQVRLLEGNFSLCVENKNGTGPFLGNIPKQYCNQILWFDSTDGTFMPSIDVTNESRNDYDDTSVCLGTRQCSWFAGCTNRTWNSSAVPLIGLPNTQDYKWVDRNSGLTWSGNDTCLYSCQNQTKGLLYQLFRNLFCSYGLTEAHGKWRCADANITNDKGHDGHQTPTWWLTGSNLTLSVNNSGLFFLCGNGVYKGFPPKWSGRCGLGYLVPSLTRYLTLNASQITNLRSFIHKVTPHRCTQRDTDDPPLYCNPKDNSTIRALFPSLGTYDLEKAILNISKAMEQEFSATKQTLEAHQSKVSSLASASQKDHVLDIPTTQRQTACGTVGKQCCLYINYSEEIKSNIQRLHEASENLKNIPLLDWEGIFAKVGDWFRSWG

SEQ ID NO: 565 - protein, 466 aa, Hylobates
HLLAPVFRTLSILTNQSNCWLCEHLDNAEQPELVFVPASASTWWTYSGQWVYERVWYPQAEVQNHSTSSYGKVTRHWEASMEAQGLSFAQVRLLEGNLSLCIENKNGTGPFLGNIPKRYCNQILWFDSTDGTFMPSTDVTNESRNDYDDTSVCLGTRQCSWLAGCTNQTWNSSAVPLIGLPNTQDYKWVDRNSGLTWSGNDTCLYSCQNQTKGLLYQLFRNLFCSYGLTEAHGKWRCADVNITNDKGYDGHQTPTWWLTGSNLTLSVNNSGLFFLCGNGVYKGFPPKWSGRCGLGYLVPSLTRYLTLNASQITNLRSFIHKVTPHRCTQRDTDNPPLYCNPKHNSTIRALFPSLGTYDLEKAILNISKAMEQEFSATKQTLEAHQSKVSSLASASRKDHVLDIPTTQRQTACRTVGKQCCLYINHSEEIMSNIQRLREASENLKNVPLLDWEGIFAKVGDWFRSWG

SEQ ID NO: 566 - protein, 466 aa, Macaca
HLLAPVFKTLSILTNQSNCWLCEHLDNAEQPELVFVPASASTWWTHSGQWMYERVWYPQAEVQNHSTSSYGKVTQHWEASMEAQGLSIAQVRLLEGNFSLCVENKNGTGPFLGNIPKQYCNQILWFDFTDGTFMPSIDVTDESRNDYDDTSVCLGTRQCSWFAGCTNQTWNSSAVPLIGLPNTQDYKWVDRNSGLTWSGNGTCLYSCQNQTKGLLYQLFRNLFCSYGLTEAHGKWRCADANITNDKGHDGHQTPTWWLTGSNLTLSVNNSGLFFLCGNGVYKGFPPKWSGRCGLGYLVPSLTRYLTLNASQITNLRSFIHKVTPHRCTQRDTDNPPLYCNPKDNSTIRALFPSLGTYDLEKAILNISKAMEQEISATKQTLEAHQSKVSSLASASQKDHVLDIPTTQRQTACRTVGKQCCLYINNSEAIMSDIQHLYEISENLKNGPFFDWEGLFAKVGDWFRSWG

SEQ ID NO: 567 - protein, 466 aa, Papio anubis
HLLAPVFQTLSILTNQSNCWLCEHLDNAEQPELVFVPASASTWWTYSGQWMYERVWYAQAEVQNHSTSSYGKVTQHWEASMEAQGLSFAQVRLLEGNFSLCVENKNGTGPFLGNIPKQYCNQILWFDFTDGTFMPSIDVTDESRNDYDDTSVCLGTRQCSWFAGCTNQTWNSSAVPLIGLPNTQDYKWVDRNSGLTWSGNGTCLYSCQNQTKGLLYQLFRNLFCSYGLTEAHGKWRCADANITNDKGHDGHQTPTWWLTGSNLTLSVNNSGLFFLCGNGVYKGFPPKWSGRCGLGYLVPSLTRYLTLNASQITNLRSFIHKVTPHRCTQRDTDNPPLYCNPKDNSTIRALFPSLGTYDLEKAILNISKAMEQEISATKQTLEAHQSKVSSLASASQKDHVLDIPTTQRQTACRTVGKQCCLYINNSEAIMSDIQHLYEISENLKNGPFFDWEGLFAKVGDWFRSWG

SEQ ID NO: 568 - protein, 465 aa, Chlorocebus sabeus
HLLAPVFQTLSILTNQSNCWLCEHLDNAEQPELIFVPASASTWWTYSGQWMYERVWYPQAEVQNHSTSSYGKVTRHWEASMEAQGLSFAQVRLLEGNFSLCVENKNGTGPFLGNIPKQYWNQILWFDFTDGTFMPSIDVTDESRNDYDTSVCLGTRQCSWFAGCTNQTWNSSAVPLIGLPNTQDYKWVDRNSGLTWSGNGTCLYSCQNQTKGLLYQLFRNLFCSYGLTEAHGKWRCADANITNDKGHDGHQTPTWWLTGSNLTLSVNNSGLFFLCGNGVYKGFPPKWSGRCGLGYLVPSLTRYLTLNASQITNLRSFIHKVTPHRCTQRDTDNPPLYCNPKDNSTIRALFPSLGTYDLEKAILNISKAMEQEISATKQTLEAHQSKVSSLASASQKDHVLDIPTTQRQTACRTVGKQCCLYINNSEAIMSDIQHLYEISENLKNGPFFDWEGLFAKVGDWFRSWG

SEQ ID NO: 569 - protein, 466 aa, Colobus angolensis palliatus
HLLAPVFRTLSILTNQSNCWLCEHLDNAEQPELVFVPASASTWWTYSGQWMYERVWYPQAEVQNQSTSSYGKATWHWEASMEAQGLSFAQVRLLEGNFSLCVENKNGTGPFLGNIPKQYCNQILWFDFTDGTFMPSIDVTDESRNDYDDTSVCLGTRQCSWFAGCTNQTWNSSAVPLIGLPNTQDYKWVDRNSGLTWSGNGTCLYSCQNQTRGLLYQLFRNLFCSYGLTQAHGKWRCADANITNDKGHDGHQTPTWWLTGSNLTLSVNNSGLFFLCGNGVYKGFPPKWSGRCGLGYLVPSLTRYLTLNASQITNLRSFIHKVTPHRCTQRDTDNPPLYCNPKDNSTIRALFPSLGTYDLEKAILNISKAMEQEISATKQTLEAHQSKVSSLASASQKDHVLDIPTTQRQTACRTVGKQCCLYINNSEAIMSDIQHLYEISENLKNGPLFDWEGLFANVGDWFRSWG

SEQ ID NO: 570 - protein, 466 aa, Semnopithecus entellus
HLLAPVFRTLSILTNQSNCWLCEHLDNAEQPELVFVPASASTWWTYSGQWMYERVWYPQAEVQNHSTSSYGKATWHWEAAMEAQGLSFAQVRLLEGNFSLCVENKNGTGPFLGNIPKQYCNQILWFDFTDGTFMPSIDVTDESRNDYDDTSVCLGTRQCSWFAGCTNQTWNSSAVPLIGLPNTQDYKWVDRNSGLTWSGNGTCLYSCQNQTKGLLYQLFRNLFCSYGLTEAHGKWRCADANITNDKDHDGHQNPTWWLTGSNLTLSVNNSGLFLLCGNGVYKGFPPKWSGRCGLGYLVPSLTRYLTLNASQITNLRSFIHKVTPHRCTQRDTDNSPLYCNPKDNSTVRALFPSLGTYDLEKAILNISKAMEQEISATKQTLEAHQSKVSSLVSASQKDHVLDIPTTQRQTACRTVGKQCCLYINNSEAIMSDIQHLYEISENLKNGPLFDWEGLFAKVGDWFRSWG

SEQ ID NO: 571 - protein, 465 aa, Rhinopithecus roxellana
HLLAPVFRTLSILTNQSNCWLCEHLDNAEQPELVFVPASASTWWTYSGQWMYKRVWYPQAEVQNHSTSSYGKATWHWEAAMEAQGLSFAQVRLLEGNFSLCVENKNGTGPFLGNIPKQYCNQILWFDFTDGTFMPSIDVTDESRNDYDDTSVCLGTRQCSWFAGCTNQTWNSSAVPLIGLPNTQDYKWVDRNSGLTWSGNGTCLYSCQNQTKGLLYQLFRNLFCSYGLTEAHGKWRCADANITNDKGHDGHQTPTWWLTGSNLTLSVNNSGLFLLCGNGVYKGFPPKWSGRCGLGYLVPSLTRYLTLNASQITNLRSFIHKVTPHRCIQRDTDNPPLYCNPKDNSTIRALFPSLGTYLEKAILNISKAMEQEISATKQTLEAHQSKVSSLASASQKDHVLDIPTTQRQTACRTVGKQCCLYINNSEAIMSDIQHLYEISENLKNGPLFDWEGLFAKVGDWFRSWG

SEQ ID NO: 572 - protein, 459 aa, Marmoset
HLLAPVFQTLSILTNQSNCWLCEHLDNAEEPELVFVPASASTWWTSSGRWMYERVWHLQAEVQNHSTSSCDKVTHHWEAFMEAQGLSFAQVRLLEGNFSLCVENKNGTGPFLGNIPKQYCIQTLWFDSTDGTFTPSIDVTEESRNDYDDTSVYLRTRQCPWFVDCTNWTWNSSTIPLIGLPSTQDYQWVDRNSGLTWSGNDTCLYSCQNQTKGLLYQLFRNLFCSYGLQEAHGKWRCADANITNDKGHDGHQTPTWWLTGANLTLSLNNSGLFILCGNGVYKGFPPKWSGRCGLGYLVPSLTRHLTLNTSQITNLRSFIHKVTPRRRTKRDTDSAPLYYNPKDNSTVRALFPSLGTSDLEKAILNLSKAIEQEFGATQPTLEGHQSNVSSLTSASPNDRVLDIPTTQRQTACGTVGKQCCLYINNSEDIMANIQRIKDISKNMKNIPLFDWGDWFTSWG

SEQ ID NO: 573 - protein, 459 aa, Saimiri
HLLAPVFRTLSILTNQSNCWLCEHLDNAEEPELVFVPASASTWWTYSGQWLYERVCHLQAEMQNHSTSSCDKVTQHWEAFMEAQGLSFAQIRLLEGNFSLCVENKNGTGPFLGNIPKQYCTQTLWFDSTDGTFTPSIDITKESRKDYDDTRVYLRTRQRPWFADRINWTWNSSTVPLIGLPSTQNYQWVDRNSGLTWSGNDTCLYSCQNQTKGLLYQLFRNIFCSYGLTEAHGKWRCADANITNDKGHDGHQTPTWWLTGANLTLSVNNSGLFILCGNGVYKGFPPKWSGRCGLGYLVPSLTRYLTLNASQITNLRSFIHKATPHRRTKRDTHNPPLYHNPKDNSTIRALFPSLGTSDLEKAILNLSKAIEQEFGATQPTLEAHQSKGSSLASASPNDRVLDLPTTQRQTACGTVDKQCCLYINNSEDIMSDIQRIKDIAKNMKNIPLFDWGVWFRSWG

SEQ ID NO: 574 - protein, 449 aa, Ateles
HLLAPVFRTLSVLTNQSNCWLCEHLDNAEEPELVFVPASASTWWTHSGQWMYERVWHPQAEVQNHSTSSWDKVTQHWEAFMEAQGLSFAQVKLLEGNFSLCIENKNGTGPFLGNIPKQYCIQTLWFDSTDGTFTPSIDVTKESRNDYDDTSVYLRTNWTWNSSTVPLIGLPGTQDYQWVDRNSGLTWSSNDTCLYSCQNQTKGLLYQLFHNIFCSYGLTEAHGKWGCADANITNDKGHDGHQTPTWWLTGANLTLSVNNSGLFILCGNGVYKGFPPKWSGRCGLGYLVPSLTRYLTLNASQITNLRSFIHKVTLRRRTKRDTDNPPLYYNPKDNSTIKALFPSLGTSDLEKAILNLSKAIDQEFGATQPTLEAHQSKVGSLASASPHDRVLDIPTTQRQTACGTVGKQCCLYINNSEDIMSDIQRIKDISENMKNIPLFDWGDWFISWG

SEQ ID NO: 575 - protein, 459 aa, Pithecia
HLLAPVFRTLSILTNQSNCWLCEHLDNAEEPELVFVPASASTWWTYSGQWIYQRVWHLQAEVQNHSTSSYDKVTQHWEAFMEAQGLSFAQVRLLEGNFSLCVENKNGTGPFLGNIPKQYCIQTLWFDSTDGTFTPSIDVTKESRNDNDDTSVYLHTRQCPWFADCTNWTWNSSTVPLIGLPSTQDYQWVDRNSGLTWSGNDTCLYSCQNQTKGLLYQLFRNIFCSYGLTEAHGKWRCADANITNDKDQNGHQTPTWWLTVANLTLSVNNSGLFILCGNGVYKGFPPKWSGRCGLGRLVPSLTRYLTLNASQITNLRSFIHKVTPHRRTKRDTDNPPLYYNPKDNSTIRALFPSLGTSDLEKAILNLSKAIEQEFSATQPNLEAHQSKVSSLASASPNDRVLDIPTTQRQTACGTVGKQCCLYINNSEDIMSDIQRIKDISENMKNVPLFDWGDWFRSWG

SEQ ID NO: 576 - protein, 466 aa, Felis catus
YPLPPLFQTLATLANLSDCWLCQHLDNAQEPELVFVPAHASTWWTHSGQWMHKREWYPQTRGHNHSTSSYGRVLWHWETSAEAQGLSLTQVRLLEGNFSVCIENKNGTGPFLGDVPKQYCNQTVWFDSTDGTFRPSIDVANESKTDYYDANVCLVTGQYSWFAGHTTGTWNSSPFPLVGLPNTQDYIWVDQNSGMTWLGNDTYLYSCQNQTKGLLYQIFRNLFCSYRLTEAHGKWRCADANITNDKGHGGHPMPAWWVTRSTLTLSVNNSGLFILCGNKVYKEFPPNWSGRCGLGYLAPSVSQYPAFNGSQITGVGSLIHKVAPHRRTQRDVIDPPPVYHNPNSLRALFSRLGTSDLEEAILNISKATEQGLAATVQTSEARQSRVSSLLSALQNHHLDLSAAQQGRTCTIVGNQCCLYVNKSKEVRFLLNSVKERIDSRRRMRELAFNWTDLVSGVRDWFSGHWG

SEQ ID NO: 577 - protein, 450 aa, Pan troglodytes
LLAPVFRTLSILTNQSNCWLCEHLDNAEQPELVFVPASASTWWTYSGQWMYERMWYPQAEVQNHSTSSYRKVTWHWEASMEAQGLSFAQVRLLEGNFSLCVENKNGSGPFLGNIPKQYCNQILWFDSTDGTFMPSIDVTNESRNDDDDTSVCLGTRQCSWFAGCTNRTWNSSAVPLIGLPNTQDYKWVDRNSGLTWSGNDTCLYSCQNQTKGLLYQLFRNLFCSYGLTEAHGKWRCADANITNDKGHDGHRAPSWWLTGSNLTLSVNNSGLFFLCGNGVYKGFPPKWSGRCGLGYLVPSLTRYLTLNASQITNLRSFIHKVTPHRCTQGDTDNPPLYCNPKDNSTIRALFPSLGTYDLEKAILNISKAMEQEFSATKQTLEAHQSKVSSLASASRKDHVLDIPTTQRQTACGTVGKQCCLYINYSEEIKSNIQRLHEASENLKNVPLLDW

SEQ ID NO: 578 - protein, 450 aa, Gorilla
LLAPVFRTLSILTNQSNCWLCEHLDNAEQPELVFVPASASTWWTYSGQWMYERVWYPQAEVQNHSTSSYRKVTWHWEASMEAQGLSFAQVRLLEGNFSLCVENKNGSGPFLGNIPKQYCNQILWFDSTDGTFMPSIDVTNESRNDDDDTSVCLGTRQCSWFAGCTNRTWNSSAVPLIGLPNTQDYKWVDRNSGLTWSGNDTCLYSCQNQTKGLLYQLFRNLFCSYGLTEAHGKWRCADANITNDKGHDGHRTPTWWLTGSNLTLSVNNSGLFFLCGNGVYKGFPPKWSGRCGLGYLVPSLTRYLTLNASQITKLRSFIHKVTPHRCTQGDTDNPPLYCNPKDNSTIRALFPSLGTYDLEKAILNISKAMEQEFSATKQTLEAHQSKVSSLASASRKDHVLDIPTTQRQTACGTVGKQCCLYINYSEEIKSNIQRLHEASENLKNVPLLDW

SEQ ID NO: 579 - protein, 450 aa, Pongo
LLAPVFRTLSILTNQSNCWLCEHLDNAEQPELVFVPSSASTWWTYSGQWMYERVWYPQAEVPNPSTSSYGKVTRHWEASMEAQGLSFAQVRLLEGNFSLCVENKNGTGPFLGNIPKQYCNQILWFDSTDGTFMPSIDVTNESRNDYDDTSVCLGTRQCSWFAGCTNRTWNSSAVPLIGLPNTQDYKWVDRNSGLTWSGNDTCLYSCQNQTKGLLYQLFRNLFCSYGLTEAHGKWRCADANITNDKGHDGHQTPTWWLTGSNLTLSVNNSGLFFLCGNGVYKGFPPKWSGRCGLGYLVPSLTRYLTLNASQITNLRSFIHKVTPHRCTQRDTDDPPLYCNPKDNSTIRALFPSLGTYDLEKAILNISKAMEQEFSATKQTLEAHQSKVSSLASASQKDHVLDIPTTQRQTACGTVGKQCCLYINYSEEIKSNIQRLHEASENLKNIPLLDW

SEQ ID NO: 580 - protein, 450 aa, Hylobates
LLAPVFRTLSILTNQSNCWLCEHLDNAEQPELVFVPASASTWWTYSGQWVYERVWYPQAEVQNHSTSSYGKVTRHWEASMEAQGLSFAQVRLLEGNLSLCIENKNGTGPFLGNIPKRYCNQILWFDSTDGTFMPSTDVTNESRNDYDDTSVCLGTRQCSWLAGCTNQTWNSSAVPLIGLPNTQDYKWVDRNSGLTWSGNDTCLYSCQNQTKGLLYQLFRNLFCSYGLTEAHGKWRCADVNITNDKGYDGHQTPTWWLTGSNLTLSVNNSGLFFLCGNGVYKGFPPKWSGRCGLGYLVPSLTRYLTLNASQITNLRSFIHKVTPHRCTQRDTDNPPLYCNPKHNSTIRALFPSLGTYDLEKAILNISKAMEQEFSATKQTLEAHQSKVSSLASASRKDHVLDIPTTQRQTACRTVGKQCCLYINHSEEIMSNIQRLREASENLKNVPLLDW

SEQ ID NO: 581 - protein, 450 aa, Macaca
LLAPVFKTLSILTNQSNCWLCEHLDNAEQPELVFVPASASTWWTHSGQWMYERVWYPQAEVQNHSTSSYGKVTQHWEASMEAQGLSIAQVRLLEGNFSLCVENKNGTGPFLGNIPKQYCNQILWFDFTDGTFMPSIDVTDESRNDYDDTSVCLGTRQCSWFAGCTNQTWNSSAVPLIGLPNTQDYKWVDRNSGLTWSGNGTCLYSCQNQTKGLLYQLFRNLFCSYGLTEAHGKWRCADANITNDKGHDGHQTPTWWLTGSNLTLSVNNSGLFFLCGNGVYKGFPPKWSGRCGLGYLVPSLTRYLTLNASQITNLRSFIHKVTPHRCTQRDTDNPPLYCNPKDNSTIRALFPSLGTYDLEKAILNISKAMEQEISATKQTLEAHQSKVSSLASASQKDHVLDIPTTQRQTACRTVGKQCCLYINNSEAIMSDIQHLYEISENLKNGPFFDW

SEQ ID NO: 582 - protein, 450 aa, Papio anubis
LLAPVFQTLSILTNQSNCWLCEHLDNAEQPELVFVPASASTWWTYSGQWMYERVWYAQAEVQNHSTSSYGKVTQHWEASMEAQGLSFAQVRLLEGNFSLCVENKNGTGPFLGNIPKQYCNQILWFDFTDGTFMPSIDVTDESRNDYDDTSVCLGTRQCSWFAGCTNQTWNSSAVPLIGLPNTQDYKWVDRNSGLTWSGNGTCLYSCQNQTKGLLYQLFRNLFCSYGLTEAHGKWRCADANITNDKGHDGHQTPTWWLTGSNLTLSVNNSGLFFLCGNGVYKGFPPKWSGRCGLGYLVPSLTRYLTLNASQITNLRSFIHKVTPHRCTQRDTDNPPLYCNPKDNSTIRALFPSLGTYDLEKAILNISKAMEQEISATKQTLEAHQSKVSSLASASQKDHVLDIPTTQRQTACRTVGKQCCLYINNSEAIMSDIQHLYEISENLKNGPFFDW

SEQ ID NO: 583 - protein, 449 aa, Chlorocebus sabeus
LLAPVFQTLSILTNQSNCWLCEHLDNAEQPELIFVPASASTWWTYSGQWMYERVWYPQAEVQNHSTSSYGKVTRHWEASMEAQGLSFAQVRLLEGNFSLCVENKNGTGPFLGNIPKQYWNQILWFDFTDGTFMPSIDVTDESRNDYDTSVCLGTRQCSWFAGCTNQTWNSSAVPLIGLPNTQDYKWVDRNSGLTWSGNGTCLYSCQNQTKGLLYQLFRNLFCSYGLTEAHGKWRCADANITNDKGHDGHQTPTWWLTGSNLTLSVNNSGLFFLCGNGVYKGFPPKWSGRCGLGYLVPSLTRYLTLNASQITNLRSFIHKVTPHRCTQRDTDNPPLYCNPKDNSTIRALFPSLGTYDLEKAILNISKAMEQEISATKQTLEAHQSKVSSLASASQKDHVLDIPTTQRQTACRTVGKQCCLYINNSEAIMSDIQHLYEISENLKNGPFFDW

SEQ ID NO: 584 - protein, 450 aa, Colobus angolensis palliatus
LLAPVFRTLSILTNQSNCWLCEHLDNAEQPELVFVPASASTWWTYSGQWMYERVWYPQAEVQNQSTSSYGKATWHWEASMEAQGLSFAQVRLLEGNFSLCVENKNGTGPFLGNIPKQYCNQILWFDFTDGTFMPSIDVTDESRNDYDDTSVCLGTRQCSWFAGCTNQTWNSSAVPLIGLPNTQDYKWVDRNSGLTWSGNGTCLYSCQNQTRGLLYQLFRNLFCSYGLTQAHGKWRCADANITNDKGHDGHQTPTWWLTGSNLTLSVNNSGLFFLCGNGVYKGFPPKWSGRCGLGYLVPSLTRYLTLNASQITNLRSFIHKVTPHRCTQRDTDNPPLYCNPKDNSTIRALFPSLGTYDLEKAILNISKAMEQEISATKQTLEAHQSKVSSLASASQKDHVLDIPTTQRQTACRTVGKQCCLYINNSEAIMSDIQHLYEISENLKNGPLFDW

SEQ ID NO: 585 - protein, 450 aa, Semnopithecus entellus
LLAPVFRTLSILTNQSNCWLCEHLDNAEQPELVFVPASASTWWTYSGQWMYERVWYPQAEVQNHSTSSYGKATWHWEAAMEAQGLSFAQVRLLEGNFSLCVENKNGTGPFLGNIPKQYCNQILWFDFTDGTFMPSIDVTDESRNDYDDTSVCLGTRQCSWFAGCTNQTWNSSAVPLIGLPNTQDYKWVDRNSGLTWSGNGTCLYSCQNQTKGLLYQLFRNLFCSYGLTEAHGKWRCADANITNDKDHDGHQNPTWWLTGSNLTLSVNNSGLFLLCGNGVYKGFPPKWSGRCGLGYLVPSLTRYLTLNASQITNLRSFIHKVTPHRCTQRDTDNSPLYCNPKDNSTVRALFPSLGTYDLEKAILNISKAMEQEISATKQTLEAHQSKVSSLVSASQKDHVLDIPTTQRQTACRTVGKQCCLYINNSEAIMSDIQHLYEISENLKNGPLFDW

SEQ ID NO: 586 - protein, 449 aa, Rhinopithecus roxellana
LLAPVFRTLSILTNQSNCWLCEHLDNAEQPELVFVPASASTWWTYSGQWMYKRVWYPQAEVQNHSTSSYGKATWHWEAAMEAQGLSFAQVRLLEGNFSLCVENKNGTGPFLGNIPKQYCNQILWFDFTDGTFMPSIDVTDESRNDYDDTSVCLGTRQCSWFAGCTNQTWNSSAVPLIGLPNTQDYKWVDRNSGLTWSGNGTCLYSCQNQTKGLLYQLFRNLFCSYGLTEAHGKWRCADANITNDKGHDGHQTPTWWLTGSNLTLSVNNSGLFLLCGNGVYKGFPPKWSGRCGLGYLVPSLTRYLTLNASQITNLRSFIHKVTPHRCIQRDTDNPPLYCNPKDNSTIRALFPSLGTYLEKAILNISKAMEQEISATKQTLEAHQSKVSSLASASQKDHVLDIPTTQRQTACRTVGKQCCLYINNSEAIMSDIQHLYEISENLKNGPLFDW

SEQ ID NO: 587 - protein, 450 aa, Marmoset
LLAPVFQTLSILTNQSNCWLCEHLDNAEEPELVFVPASASTWWTSSGRWMYERVWHLQAEVQNHSTSSCDKVTHHWEAFMEAQGLSFAQVRLLEGNFSLCVENKNGTGPFLGNIPKQYCIQTLWFDSTDGTFTPSIDVTEESRNDYDDTSVYLRTRQCPWFVDCTNWTWNSSTIPLIGLPSTQDYQWVDRNSGLTWSGNDTCLYSCQNQTKGLLYQLFRNLFCSYGLQEAHGKWRCADANITNDKGHDGHQTPTWWLTGANLTLSLNNSGLFILCGNGVYKGFPPKWSGRCGLGYLVPSLTRHLTLNTSQITNLRSFIHKVTPRRRTKRDTDSAPLYYNPKDNSTVRALFPSLGTSDLEKAILNLSKAIEQEFGATQPTLEGHQSNVSSLTSASPNDRVLDIPTTQRQTACGTVGKQCCLYINNSEDIMANIQRIKDISKNMKNIPLFDW

SEQ ID NO: 588 - protein, 450 aa, Saimiri
LLAPVFRTLSILTNQSNCWLCEHLDNAEEPELVFVPASASTWWTYSGQWLYERVCHLQAEMQNHSTSSCDKVTQHWEAFMEAQGLSFAQIRLLEGNFSLCVENKNGTGPFLGNIPKQYCTQTLWFDSTDGTFTPSIDITKESRKDYDDTRVYLRTRQRPWFADRINWTWNSSTVPLIGLPSTQNYQWVDRNSGLTWSGNDTCLYSCQNQTKGLLYQLFRNIFCSYGLTEAHGKWRCADANITNDKGHDGHQTPTWWLTGANLTLSVNNSGLFILCGNGVYKGFPPKWSGRCGLGYLVPSLTRYLTLNASQITNLRSFIHKATPHRRTKRDTHNPPLYHNPKDNSTIRALFPSLGTSDLEKAILNLSKAIEQEFGATQPTLEAHQSKGSSLASASPNDRVLDLPTTQRQTACGTVDKQCCLYINNSEDIMSDIQRIKDIAKNMKNIPLFDW

SEQ ID NO: 589 - protein, 440 aa, Ateles
LLAPVFRTLSVLTNQSNCWLCEHLDNAEEPELVFVPASASTWWTHSGQWMYERVWHPQAEVQNHSTSSWDKVTQHWEAFMEAQGLSFAQVKLLEGNFSLCIENKNGTGPFLGNIPKQYCIQTLWFDSTDGTFTPSIDVTKESRNDYDDTSVYLRTNWTWNSSTVPLIGLPGTQDYQWVDRNSGLTWSSNDTCLYSCQNQTKGLLYQLFHNIFCSYGLTEAHGKWGCADANITNDKGHDGHQTPTWWLTGANLTLSVNNSGLFILCGNGVYKGFPPKWSGRCGLGYLVPSLTRYLTLNASQITNLRSFIHKVTLRRRTKRDTDNPPLYYNPKDNSTIKALFPSLGTSDLEKAILNLSKAIDQEFGATQPTLEAHQSKVGSLASASPHDRVLDIPTTQRQTACGTVGKQCCLYINNSEDIMSDIQRIKDISENMKNIPLFDW

SEQ ID NO: 590 - protein, 450 aa, Pithecia
LLAPVFRTLSILTNQSNCWLCEHLDNAEEPELVFVPASASTWWTYSGQWIYQRVWHLQAEVQNHSTSSYDKVTQHWEAFMEAQGLSFAQVRLLEGNFSLCVENKNGTGPFLGNIPKQYCIQTLWFDSTDGTFTPSIDVTKESRNDNDDTSVYLHTRQCPWFADCTNWTWNSSTVPLIGLPSTQDYQWVDRNSGLTWSGNDTCLYSCQNQTKGLLYQLFRNIFCSYGLTEAHGKWRCADANITNDKDQNGHQTPTWWLTVANLTLSVNNSGLFILCGNGVYKGFPPKWSGRCGLGRLVPSLTRYLTLNASQITNLRSFIHKVTPHRRTKRDTDNPPLYYNPKDNSTIRALFPSLGTSDLEKAILNLSKAIEQEFSATQPNLEAHQSKVSSLASASPNDRVLDIPTTQRQTACGTVGKQCCLYINNSEDIMSDIQRIKDISENMKNVPLFDW

SEQ ID NO: 591 - protein, 459 aa, Felis catus
PLPPLFQTLATLANLSDCWLCQHLDNAQEPELVFVPAHASTWWTHSGQWMHKREWYPQTRGHNHSTSSYGRVLWHWETSAEAQGLSLTQVRLLEGNFSVCIENKNGTGPFLGDVPKQYCNQTVWFDSTDGTFRPSIDVANESKTDYYDANVCLVTGQYSWFAGHTTGTWNSSPFPLVGLPNTQDYIWVDQNSGMTWLGNDTYLYSCQNQTKGLLYQIFRNLFCSYRLTEAHGKWRCADANITNDKGHGGHPMPAWWVTRSTLTLSVNNSGLFILCGNKVYKEFPPNWSGRCGLGYLAPSVSQYPAFNGSQITGVGSLIHKVAPHRRTQRDVIDPPPVYHNPNSLRALFSRLGTSDLEEAILNISKATEQGLAATVQTSEARQSRVSSLLSALQNHHLDLSAAQQGRTCTIVGNQCCLYVNKSKEVRFLLNSVKERIDSRRRMRELAFNWTDLVSGVRDW

SEQ ID NO: 592 - protein, 452 aa, Pan troglodytes
QHLLAPVFRTLSILTNQSNCWLCEHLDNAEQPELVFVPASASTWWTYSGQWMYERMWYPQAEVQNHSTSSYRKVTWHWEASMEAQGLSFAQVRLLEGNFSLCVENKNGSGPFLGNIPKQYCNQILWFDSTDGTFMPSIDVTNESRNDDDDTSVCLGTRQCSWFAGCTNRTWNSSAVPLIGLPNTQDYKWVDRNSGLTWSGNDTCLYSCQNQTKGLLYQLFRNLFCSYGLTEAHGKWRCADANITNDKGHDGHRAPSWWLTGSNLTLSVNNSGLFFLCGNGVYKGFPPKWSGRCGLGYLVPSLTRYLTLNASQITNLRSFIHKVTPHRCTQGDTDNPPLYCNPKDNSTIRALFPSLGTYDLEKAILNISKAMEQEFSATKQTLEAHQSKVSSLASASRKDHVLDIPTTQRQTACGTVGKQCCLYINYSEEIKSNIQRLHEASENLKNVPLLDW

SEQ ID NO: 593 - protein, 452 aa, Gorilla
QHLLAPVFRTLSILTNQSNCWLCEHLDNAEQPELVFVPASASTWWTYSGQWMYERVWYPQAEVQNHSTSSYRKVTWHWEASMEAQGLSFAQVRLLEGNFSLCVENKNGSGPFLGNIPKQYCNQILWFDSTDGTFMPSIDVTNESRNDDDDTSVCLGTRQCSWFAGCTNRTWNSSAVPLIGLPNTQDYKWVDRNSGLTWSGNDTCLYSCQNQTKGLLYQLFRNLFCSYGLTEAHGKWRCADANITNDKGHDGHRTPTWWLTGSNLTLSVNNSGLFFLCGNGVYKGFPPKWSGRCGLGYLVPSLTRYLTLNASQITKLRSFIHKVTPHRCTQGDTDNPPLYCNPKDNSTIRALFPSLGTYDLEKAILNISKAMEQEFSATKQTLEAHQSKVSSLASASRKDHVLDIPTTQRQTACGTVGKQCCLYINYSEEIKSNIQRLHEASENLKNVPLLDW

SEQ ID NO: 594 - protein, 452 aa, Pongo
QHLLAPVFRTLSILTNQSNCWLCEHLDNAEQPELVFVPSSASTWWTYSGQWMYERVWYPQAEVPNPSTSSYGKVTRHWEASMEAQGLSFAQVRLLEGNFSLCVENKNGTGPFLGNIPKQYCNQILWFDSTDGTFMPSIDVTNESRNDYDDTSVCLGTRQCSWFAGCTNRTWNSSAVPLIGLPNTQDYKWVDRNSGLTWSGNDTCLYSCQNQTKGLLYQLFRNLFCSYGLTEAHGKWRCADANITNDKGHDGHQTPTWWLTGSNLTLSVNNSGLFFLCGNGVYKGFPPKWSGRCGLGYLVPSLTRYLTLNASQITNLRSFIHKVTPHRCTQRDTDDPPLYCNPKDNSTIRALFPSLGTYDLEKAILNISKAMEQEFSATKQTLEAHQSKVSSLASASQKDHVLDIPTTQRQTACGTVGKQCCLYINYSEEIKSNIQRLHEASENLKNIPLLDW

SEQ ID NO: 595 - protein, 452 aa, Hylobates
QHLLAPVFRTLSILTNQSNCWLCEHLDNAEQPELVFVPASASTWWTYSGQWVYERVWYPQAEVQNHSTSSYGKVTRHWEASMEAQGLSFAQVRLLEGNLSLCIENKNGTGPFLGNIPKRYCNQILWFDSTDGTFMPSTDVTNESRNDYDDTSVCLGTRQCSWLAGCTNQTWNSSAVPLIGLPNTQDYKWVDRNSGLTWSGNDTCLYSCQNQTKGLLYQLFRNLFCSYGLTEAHGKWRCADVNITNDKGYDGHQTPTWWLTGSNLTLSVNNSGLFFLCGNGVYKGFPPKWSGRCGLGYLVPSLTRYLTLNASQITNLRSFIHKVTPHRCTQRDTDNPPLYCNPKHNSTIRALFPSLGTYDLEKAILNISKAMEQEFSATKQTLEAHQSKVSSLASASRKDHVLDIPTTQRQTACRTVGKQCCLYINHSEEIMSNIQRLREASENLKNVPLLDW

SEQ ID NO: 596 - protein, 452 aa, Macaca
QHLLAPVFKTLSILTNQSNCWLCEHLDNAEQPELVFVPASASTWWTHSGQWMYERVWYPQAEVQNHSTSSYGKVTQHWEASMEAQGLSIAQVRLLEGNFSLCVENKNGTGPFLGNIPKQYCNQILWFDFTDGTFMPSIDVTDESRNDYDDTSVCLGTRQCSWFAGCTNQTWNSSAVPLIGLPNTQDYKWVDRNSGLTWSGNGTCLYSCQNQTKGLLYQLFRNLFCSYGLTEAHGKWRCADANITNDKGHDGHQTPTWWLTGSNLTLSVNNSGLFFLCGNGVYKGFPPKWSGRCGLGYLVPSLTRYLTLNASQITNLRSFIHKVTPHRCTQRDTDNPPLYCNPKDNSTIRALFPSLGTYDLEKAILNISKAMEQEISATKQTLEAHQSKVSSLASASQKDHVLDIPTTQRQTACRTVGKQCCLYINNSEAIMSDIQHLYEISENLKNGPFFDW

SEQ ID NO: 597 - protein, 452 aa, Papio anubis
QHLLAPVFQTLSILTNQSNCWLCEHLDNAEQPELVFVPASASTWWTYSGQWMYERVWYAQAEVQNHSTSSYGKVTQHWEASMEAQGLSFAQVRLLEGNFSLCVENKNGTGPFLGNIPKQYCNQILWFDFTDGTFMPSIDVTDESRNDYDDTSVCLGTRQCSWFAGCTNQTWNSSAVPLIGLPNTQDYKWVDRNSGLTWSGNGTCLYSCQNQTKGLLYQLFRNLFCSYGLTEAHGKWRCADANITNDKGHDGHQTPTWWLTGSNLTLSVNNSGLFFLCGNGVYKGFPPKWSGRCGLGYLVPSLTRYLTLNASQITNLRSFIHKVTPHRCTQRDTDNPPLYCNPKDNSTIRALFPSLGTYDLEKAILNISKAMEQEISATKQTLEAHQSKVSSLASASQKDHVLDIPTTQRQTACRTVGKQCCLYINNSEAIMSDIQHLYEISENLKNGPFFDW

SEQ ID NO: 598 - protein, 451 aa, Chlorocebus sabeus
QHLLAPVFQTLSILTNQSNCWLCEHLDNAEQPELIFVPASASTWWTYSGQWMYERVWYPQAEVQNHSTSSYGKVTRHWEASMEAQGLSFAQVRLLEGNFSLCVENKNGTGPFLGNIPKQYWNQILWFDFTDGTFMPSIDVTDESRNDYDTSVCLGTRQCSWFAGCTNQTWNSSAVPLIGLPNTQDYKWVDRNSGLTWSGNGTCLYSCQNQTKGLLYQLFRNLFCSYGLTEAHGKWRCADANITNDKGHDGHQTPTWWLTGSNLTLSVNNSGLFFLCGNGVYKGFPPKWSGRCGLGYLVPSLTRYLTLNASQITNLRSFIHKVTPHRCTQRDTDNPPLYCNPKDNSTIRALFPSLGTYDLEKAILNISKAMEQEISATKQTLEAHQSKVSSLASASQKDHVLDIPTTQRQTACRTVGKQCCLYINNSEAIMSDIQHLYEISENLKNGPFFDW

SEQ ID NO: 599 - protein, 452 aa, Colobus angolensis palliatus
QHLLAPVFRTLSILTNQSNCWLCEHLDNAEQPELVFVPASASTWWTYSGQWMYERVWYPQAEVQNQSTSSYGKATWHWEASMEAQGLSFAQVRLLEGNFSLCVENKNGTGPFLGNIPKQYCNQILWFDFTDGTFMPSIDVTDESRNDYDDTSVCLGTRQCSWFAGCTNQTWNSSAVPLIGLPNTQDYKWVDRNSGLTWSGNGTCLYSCQNQTRGLLYQLFRNLFCSYGLTQAHGKWRCADANITNDKGHDGHQTPTWWLTGSNLTLSVNNSGLFFLCGNGVYKGFPPKWSGRCGLGYLVPSLTRYLTLNASQITNLRSFIHKVTPHRCTQRDTDNPPLYCNPKDNSTIRALFPSLGTYDLEKAILNISKAMEQEISATKQTLEAHQSKVSSLASASQKDHVLDIPTTQRQTACRTVGKQCCLYINNSEAIMSDIQHLYEISENLKNGPLFDW

SEQ ID NO: 600 - protein, 452 aa, Semnopithecus entellus
QHLLAPVFRTLSILTNQSNCWLCEHLDNAEQPELVFVPASASTWWTYSGQWMYERVWYPQAEVQNHSTSSYGKATWHWEAAMEAQGLSFAQVRLLEGNFSLCVENKNGTGPFLGNIPKQYCNQILWFDFTDGTFMPSIDVTDESRNDYDDTSVCLGTRQCSWFAGCTNQTWNSSAVPLIGLPNTQDYKWVDRNSGLTWSGNGTCLYSCQNQTKGLLYQLFRNLFCSYGLTEAHGKWRCADANITNDKDHDGHQNPTWWLTGSNLTLSVNNSGLFLLCGNGVYKGFPPKWSGRCGLGYLVPSLTRYLTLNASQITNLRSFIHKVTPHRCTQRDTDNSPLYCNPKDNSTVRALFPSLGTYDLEKAILNISKAMEQEISATKQTLEAHQSKVSSLVSASQKDHVLDIPTTQRQTACRTVGKQCCLYINNSEAIMSDIQHLYEISENLKNGPLFDW

SEQ ID NO: 601 - protein, 451 aa, Rhinopithecus roxellana
QHLLAPVFRTLSILTNQSNCWLCEHLDNAEQPELVFVPASASTWWTYSGQWMYKRVWYPQAEVQNHSTSSYGKATWHWEAAMEAQGLSFAQVRLLEGNFSLCVENKNGTGPFLGNIPKQYCNQILWFDFTDGTFMPSIDVTDESRNDYDDTSVCLGTRQCSWFAGCTNQTWNSSAVPLIGLPNTQDYKWVDRNSGLTWSGNGTCLYSCQNQTKGLLYQLFRNLFCSYGLTEAHGKWRCADANITNDKGHDGHQTPTWWLTGSNLTLSVNNSGLFLLCGNGVYKGFPPKWSGRCGLGYLVPSLTRYLTLNASQITNLRSFIHKVTPHRCIQRDTDNPPLYCNPKDNSTIRALFPSLGTYLEKAILNISKAMEQEISATKQTLEAHQSKVSSLASASQKDHVLDIPTTQRQTACRTVGKQCCLYINNSEAIMSDIQHLYEISENLKNGPLFDW

SEQ ID NO: 602 - protein, 452 aa, Marmoset
QHLLAPVFQTLSILTNQSNCWLCEHLDNAEEPELVFVPASASTWWTSSGRWMYERVWHLQAEVQNHSTSSCDKVTHHWEAFMEAQGLSFAQVRLLEGNFSLCVENKNGTGPFLGNIPKQYCIQTLWFDSTDGTFTPSIDVTEESRNDYDDTSVYLRTRQCPWFVDCTNWTWNSSTIPLIGLPSTQDYQWVDRNSGLTWSGNDTCLYSCQNQTKGLLYQLFRNLFCSYGLQEAHGKWRCADANITNDKGHDGHQTPTWWLTGANLTLSLNNSGLFILCGNGVYKGFPPKWSGRCGLGYLVPSLTRHLTLNTSQITNLRSFIHKVTPRRRTKRDTDSAPLYYNPKDNSTVRALFPSLGTSDLEKAILNLSKAIEQEFGATQPTLEGHQSNVSSLTSASPNDRVLDIPTTQRQTACGTVGKQCCLYINNSEDIMANIQRIKDISKNMKNIPLFDW

SEQ ID NO: 603 - protein, 452 aa, Saimiri
QHLLAPVFRTLSILTNQSNCWLCEHLDNAEEPELVFVPASASTWWTYSGQWLYERVCHLQAEMQNHSTSSCDKVTQHWEAFMEAQGLSFAQIRLLEGNFSLCVENKNGTGPFLGNIPKQYCTQTLWFDSTDGTFTPSIDITKESRKDYDDTRVYLRTRQRPWFADRINWTWNSSTVPLIGLPSTQNYQWVDRNSGLTWSGNDTCLYSCQNQTKGLLYQLFRNIFCSYGLTEAHGKWRCADANITNDKGHDGHQTPTWWLTGANLTLSVNNSGLFILCGNGVYKGFPPKWSGRCGLGYLVPSLTRYLTLNASQITNLRSFIHKATPHRRTKRDTHNPPLYHNPKDNSTIRALFPSLGTSDLEKAILNLSKAIEQEFGATQPTLEAHQSKGSSLASASPNDRVLDLPTTQRQTACGTVDKQCCLYINNSEDIMSDIQRIKDIAKNMKNIPLFDW

SEQ ID NO: 604 - protein, 445 aa, Ateles
QHLLAPVFRTLSVLTNQSNCWLCEHLDNAEEPELVFVPASASTWWTHSGQWMYERVWHPQAEVQNHSTSSWDKVTQHWEAFMEAQGLSFAQVKLLEGNFSLCIENKNGTGPFLGNIPKQYCIQTLWFDSTDGTFTPSIDVTKESRNDYDDTSVYLRTNWTWNSSTVPLIGLPGTQDYQWVDRNSGLTWSSNDTCLYSCQNQTKGLLYQLFHNIFCSYGLTEAHGKWGCADANITNDKGHDGHQTPTWWLTGANLTLSVNNSGLFILCGNGVYKGFPPKWSGRCGLGYLVPSLTRYLTLNASQITNLRSFIHKVTLRRRTKRDTDNPPLYYNPKDNSTIKALFPSLGTSDLEKAILNLSKAIDQEFGATQPTLEAHQSKVGSLASASPHDRVLDIPTTQRQTACGTVGKQCCLYINNSEDIMSDIQRIKDISENMKNIPLFDWGDW

SEQ ID NO: 605 - protein, 452 aa, Pithecia
QHLLAPVFRTLSILTNQSNCWLCEHLDNAEEPELVFVPASASTWWTYSGQWIYQRVWHLQAEVQNHSTSSYDKVTQHWEAFMEAQGLSFAQVRLLEGNFSLCVENKNGTGPFLGNIPKQYCIQTLWFDSTDGTFTPSIDVTKESRNDNDDTSVYLHTRQCPWFADCTNWTWNSSTVPLIGLPSTQDYQWVDRNSGLTWSGNDTCLYSCQNQTKGLLYQLFRNIFCSYGLTEAHGKWRCADANITNDKDQNGHQTPTWWLTVANLTLSVNNSGLFILCGNGVYKGFPPKWSGRCGLGRLVPSLTRYLTLNASQITNLRSFIHKVTPHRRTKRDTDNPPLYYNPKDNSTIRALFPSLGTSDLEKAILNLSKAIEQEFSATQPNLEAHQSKVSSLASASPNDRVLDIPTTQRQTACGTVGKQCCLYINNSEDIMSDIQRIKDISENMKNVPLFDW

SEQ ID NO: 606 - protein, 461 aa, Felis catus
RYPLPPLFQTLATLANLSDCWLCQHLDNAQEPELVFVPAHASTWWTHSGQWMHKREWYPQTRGHNHSTSSYGRVLWHWETSAEAQGLSLTQVRLLEGNFSVCIENKNGTGPFLGDVPKQYCNQTVWFDSTDGTFRPSIDVANESKTDYYDANVCLVTGQYSWFAGHTTGTWNSSPFPLVGLPNTQDYIWVDQNSGMTWLGNDTYLYSCQNQTKGLLYQIFRNLFCSYRLTEAHGKWRCADANITNDKGHGGHPMPAWWVTRSTLTLSVNNSGLFILCGNKVYKEFPPNWSGRCGLGYLAPSVSQYPAFNGSQITGVGSLIHKVAPHRRTQRDVIDPPPVYHNPNSLRALFSRLGTSDLEEAILNISKATEQGLAATVQTSEARQSRVSSLLSALQNHHLDLSAAQQGRTCTIVGNQCCLYVNKSKEVRFLLNSVKERIDSRRRMRELAFNWTDLVSGVRDW

SEQ ID NO: 607 - protein, 461 aa, Pan troglodytes
HLLAPVFRTLSILTNQSNCWLCEHLDNAEQPELVFVPASASTWWTYSGQWMYERMWYPQAEVQNHSTSSYRKVTWHWEASMEAQGLSFAQVRLLEGNFSLCVENKNGSGPFLGNIPKQYCNQILWFDSTDGTFMPSIDVTNESRNDDDDTSVCLGTRQCSWFAGCTNRTWNSSAVPLIGLPNTQDYKWVDRNSGLTWSGNDTCLYSCQNQTKGLLYQLFRNLFCSYGLTEAHGKWRCADANITNDKGHDGHRAPSWWLTGSNLTLSVNNSGLFFLCGNGVYKGFPPKWSGRCGLGYLVPSLTRYLTLNASQITNLRSFIHKVTPHRCTQGDTDNPPLYCNPKDNSTIRALFPSLGTYDLEKAILNISKAMEQEFSATKQTLEAHQSKVSSLASASRKDHVLDIPTTQRQTACGTVGKQCCLYINYSEEIKSNIQRLHEASENLKNVPLLDWQGIFAKVGDW

SEQ ID NO: 608 - protein, 461 aa, Gorilla
HLLAPVFRTLSILTNQSNCWLCEHLDNAEQPELVFVPASASTWWTYSGQWMYERVWYPQAEVQNHSTSSYRKVTWHWEASMEAQGLSFAQVRLLEGNFSLCVENKNGSGPFLGNIPKQYCNQILWFDSTDGTFMPSIDVTNESRNDDDDTSVCLGTRQCSWFAGCTNRTWNSSAVPLIGLPNTQDYKWVDRNSGLTWSGNDTCLYSCQNQTKGLLYQLFRNLFCSYGLTEAHGKWRCADANITNDKGHDGHRTPTWWLTGSNLTLSVNNSGLFFLCGNGVYKGFPPKWSGRCGLGYLVPSLTRYLTLNASQITKLRSFIHKVTPHRCTQGDTDNPPLYCNPKDNSTIRALFPSLGTYDLEKAILNISKAMEQEFSATKQTLEAHQSKVSSLASASRKDHVLDIPTTQRQTACGTVGKQCCLYINYSEEIKSNIQRLHEASENLKNVPLLDWQGIFAKVGDW

SEQ ID NO: 609 - protein, 461 aa, Pongo
HLLAPVFRTLSILTNQSNCWLCEHLDNAEQPELVFVPSSASTWWTYSGQWMYERVWYPQAEVPNPSTSSYGKVTRHWEASMEAQGLSFAQVRLLEGNFSLCVENKNGTGPFLGNIPKQYCNQILWFDSTDGTFMPSIDVTNESRNDYDDTSVCLGTRQCSWFAGCTNRTWNSSAVPLIGLPNTQDYKWVDRNSGLTWSGNDTCLYSCQNQTKGLLYQLFRNLFCSYGLTEAHGKWRCADANITNDKGHDGHQTPTWWLTGSNLTLSVNNSGLFFLCGNGVYKGFPPKWSGRCGLGYLVPSLTRYLTLNASQITNLRSFIHKVTPHRCTQRDTDDPPLYCNPKDNSTIRALFPSLGTYDLEKAILNISKAMEQEFSATKQTLEAHQSKVSSLASASQKDHVLDIPTTQRQTACGTVGKQCCLYINYSEEIKSNIQRLHEASENLKNIPLLDWEGIFAKVGDW

SEQ ID NO: 610 - protein, 461 aa, Hylobates
HLLAPVFRTLSILTNQSNCWLCEHLDNAEQPELVFVPASASTWWTYSGQWVYERVWYPQAEVQNHSTSSYGKVTRHWEASMEAQGLSFAQVRLLEGNLSLCIENKNGTGPFLGNIPKRYCNQILWFDSTDGTFMPSTDVTNESRNDYDDTSVCLGTRQCSWLAGCTNQTWNSSAVPLIGLPNTQDYKWVDRNSGLTWSGNDTCLYSCQNQTKGLLYQLFRNLFCSYGLTEAHGKWRCADVNITNDKGYDGHQTPTWWLTGSNLTLSVNNSGLFFLCGNGVYKGFPPKWSGRCGLGYLVPSLTRYLTLNASQITNLRSFIHKVTPHRCTQRDTDNPPLYCNPKHNSTIRALFPSLGTYDLEKAILNISKAMEQEFSATKQTLEAHQSKVSSLASASRKDHVLDIPTTQRQTACRTVGKQCCLYINHSEEIMSNIQRLREASENLKNVPLLDWEGIFAKVGDW

SEQ ID NO: 611 - protein, 461 aa, Macaca
HLLAPVFKTLSILTNQSNCWLCEHLDNAEQPELVFVPASASTWWTHSGQWMYERVWYPQAEVQNHSTSSYGKVTQHWEASMEAQGLSIAQVRLLEGNFSLCVENKNGTGPFLGNIPKQYCNQILWFDFTDGTFMPSIDVTDESRNDYDDTSVCLGTRQCSWFAGCTNQTWNSSAVPLIGLPNTQDYKWVDRNSGLTWSGNGTCLYSCQNQTKGLLYQLFRNLFCSYGLTEAHGKWRCADANITNDKGHDGHQTPTWWLTGSNLTLSVNNSGLFFLCGNGVYKGFPPKWSGRCGLGYLVPSLTRYLTLNASQITNLRSFIHKVTPHRCTQRDTDNPPLYCNPKDNSTIRALFPSLGTYDLEKAILNISKAMEQEISATKQTLEAHQSKVSSLASASQKDHVLDIPTTQRQTACRTVGKQCCLYINNSEAIMSDIQHLYEISENLKNGPFFDWEGLFAKVGDW

SEQ ID NO: 612 - protein, 461 aa, Papio anubis
HLLAPVFQTLSILTNQSNCWLCEHLDNAEQPELVFVPASASTWWTYSGQWMYERVWYAQAEVQNHSTSSYGKVTQHWEASMEAQGLSFAQVRLLEGNFSLCVENKNGTGPFLGNIPKQYCNQILWFDFTDGTFMPSIDVTDESRNDYDDTSVCLGTRQCSWFAGCTNQTWNSSAVPLIGLPNTQDYKWVDRNSGLTWSGNGTCLYSCQNQTKGLLYQLFRNLFCSYGLTEAHGKWRCADANITNDKGHDGHQTPTWWLTGSNLTLSVNNSGLFFLCGNGVYKGFPPKWSGRCGLGYLVPSLTRYLTLNASQITNLRSFIHKVTPHRCTQRDTDNPPLYCNPKDNSTIRALFPSLGTYDLEKAILNISKAMEQEISATKQTLEAHQSKVSSLASASQKDHVLDIPTTQRQTACRTVGKQCCLYINNSEAIMSDIQHLYEISENLKNGPFFDWEGLFAKVGDW

SEQ ID NO: 613 - protein, 460 aa, Chlorocebus sabeus
HLLAPVFQTLSILTNQSNCWLCEHLDNAEQPELIFVPASASTWWTYSGQWMYERVWYPQAEVQNHSTSSYGKVTRHWEASMEAQGLSFAQVRLLEGNFSLCVENKNGTGPFLGNIPKQYWNQILWFDFTDGTFMPSIDVTDESRNDYDTSVCLGTRQCSWFAGCTNQTWNSSAVPLIGLPNTQDYKWVDRNSGLTWSGNGTCLYSCQNQTKGLLYQLFRNLFCSYGLTEAHGKWRCADANITNDKGHDGHQTPTWWLTGSNLTLSVNNSGLFFLCGNGVYKGFPPKWSGRCGLGYLVPSLTRYLTLNASQITNLRSFIHKVTPHRCTQRDTDNPPLYCNPKDNSTIRALFPSLGTYDLEKAILNISKAMEQEISATKQTLEAHQSKVSSLASASQKDHVLDIPTTQRQTACRTVGKQCCLYINNSEAIMSDIQHLYEISENLKNGPFFDWEGLFAKVGDW

SEQ ID NO: 614 - protein, 461 aa, Colobus angolensis palliatus
HLLAPVFRTLSILTNQSNCWLCEHLDNAEQPELVFVPASASTWWTYSGQWMYERVWYPQAEVQNQSTSSYGKATWHWEASMEAQGLSFAQVRLLEGNFSLCVENKNGTGPFLGNIPKQYCNQILWFDFTDGTFMPSIDVTDESRNDYDDTSVCLGTRQCSWFAGCTNQTWNSSAVPLIGLPNTQDYKWVDRNSGLTWSGNGTCLYSCQNQTRGLLYQLFRNLFCSYGLTQAHGKWRCADANITNDKGHDGHQTPTWWLTGSNLTLSVNNSGLFFLCGNGVYKGFPPKWSGRCGLGYLVPSLTRYLTLNASQITNLRSFIHKVTPHRCTQRDTDNPPLYCNPKDNSTIRALFPSLGTYDLEKAILNISKAMEQEISATKQTLEAHQSKVSSLASASQKDHVLDIPTTQRQTACRTVGKQCCLYINNSEAIMSDIQHLYEISENLKNGPLFDWEGLFANVGDW

SEQ ID NO: 615 - protein, 461 aa, Semnopithecus entellus
HLLAPVFRTLSILTNQSNCWLCEHLDNAEQPELVFVPASASTWWTYSGQWMYERVWYPQAEVQNHSTSSYGKATWHWEAAMEAQGLSFAQVRLLEGNFSLCVENKNGTGPFLGNIPKQYCNQILWFDFTDGTFMPSIDVTDESRNDYDDTSVCLGTRQCSWFAGCTNQTWNSSAVPLIGLPNTQDYKWVDRNSGLTWSGNGTCLYSCQNQTKGLLYQLFRNLFCSYGLTEAHGKWRCADANITNDKDHDGHQNPTWWLTGSNLTLSVNNSGLFLLCGNGVYKGFPPKWSGRCGLGYLVPSLTRYLTLNASQITNLRSFIHKVTPHRCTQRDTDNSPLYCNPKDNSTVRALFPSLGTYDLEKAILNISKAMEQEISATKQTLEAHQSKVSSLVSASQKDHVLDIPTTQRQTACRTVGKQCCLYINNSEAIMSDIQHLYEISENLKNGPLFDWEGLFAKVGDW

SEQ ID NO: 616 - protein, 460 aa, Rhinopithecus roxellana
HLLAPVFRTLSILTNQSNCWLCEHLDNAEQPELVFVPASASTWWTYSGQWMYKRVWYPQAEVQNHSTSSYGKATWHWEAAMEAQGLSFAQVRLLEGNFSLCVENKNGTGPFLGNIPKQYCNQILWFDFTDGTFMPSIDVTDESRNDYDDTSVCLGTRQCSWFAGCTNQTWNSSAVPLIGLPNTQDYKWVDRNSGLTWSGNGTCLYSCQNQTKGLLYQLFRNLFCSYGLTEAHGKWRCADANITNDKGHDGHQTPTWWLTGSNLTLSVNNSGLFLLCGNGVYKGFPPKWSGRCGLGYLVPSLTRYLTLNASQITNLRSFIHKVTPHRCIQRDTDNPPLYCNPKDNSTIRALFPSLGTYLEKAILNISKAMEQEISATKQTLEAHQSKVSSLASASQKDHVLDIPTTQRQTACRTVGKQCCLYINNSEAIMSDIQHLYEISENLKNGPLFDWEGLFAKVGDW

SEQ ID NO: 617 - protein, 454 aa, Marmoset
HLLAPVFQTLSILTNQSNCWLCEHLDNAEEPELVFVPASASTWWTSSGRWMYERVWHLQAEVQNHSTSSCDKVTHHWEAFMEAQGLSFAQVRLLEGNFSLCVENKNGTGPFLGNIPKQYCIQTLWFDSTDGTFTPSIDVTEESRNDYDDTSVYLRTRQCPWFVDCTNWTWNSSTIPLIGLPSTQDYQWVDRNSGLTWSGNDTCLYSCQNQTKGLLYQLFRNLFCSYGLQEAHGKWRCADANITNDKGHDGHQTPTWWLTGANLTLSLNNSGLFILCGNGVYKGFPPKWSGRCGLGYLVPSLTRHLTLNTSQITNLRSFIHKVTPRRRTKRDTDSAPLYYNPKDNSTVRALFPSLGTSDLEKAILNLSKAIEQEFGATQPTLEGHQSNVSSLTSASPNDRVLDIPTTQRQTACGTVGKQCCLYINNSEDIMANIQRIKDISKNMKNIPLFDWGDW

SEQ ID NO: 618 - protein, 451 aa, Saimiri
HLLAPVFRTLSILTNQSNCWLCEHLDNAEEPELVFVPASASTWWTYSGQWLYERVCHLQAEMQNHSTSSCDKVTQHWEAFMEAQGLSFAQIRLLEGNFSLCVENKNGTGPFLGNIPKQYCTQTLWFDSTDGTFTPSIDITKESRKDYDDTRVYLRTRQRPWFADRINWTWNSSTVPLIGLPSTQNYQWVDRNSGLTWSGNDTCLYSCQNQTKGLLYQLFRNIFCSYGLTEAHGKWRCADANITNDKGHDGHQTPTWWLTGANLTLSVNNSGLFILCGNGVYKGFPPKWSGRCGLGYLVPSLTRYLTLNASQITNLRSFIHKATPHRRTKRDTHNPPLYHNPKDNSTIRALFPSLGTSDLEKAILNLSKAIEQEFGATQPTLEAHQSKGSSLASASPNDRVLDLPTTQRQTACGTVDKQCCLYINNSEDIMSDIQRIKDIAKNMKNIPLFDW

SEQ ID NO: 619 - protein, 441 aa, Ateles
HLLAPVFRTLSVLTNQSNCWLCEHLDNAEEPELVFVPASASTWWTHSGQWMYERVWHPQAEVQNHSTSSWDKVTQHWEAFMEAQGLSFAQVKLLEGNFSLCIENKNGTGPFLGNIPKQYCIQTLWFDSTDGTFTPSIDVTKESRNDYDDTSVYLRTNWTWNSSTVPLIGLPGTQDYQWVDRNSGLTWSSNDTCLYSCQNQTKGLLYQLFHNIFCSYGLTEAHGKWGCADANITNDKGHDGHQTPTWWLTGANLTLSVNNSGLFILCGNGVYKGFPPKWSGRCGLGYLVPSLTRYLTLNASQITNLRSFIHKVTLRRRTKRDTDNPPLYYNPKDNSTIKALFPSLGTSDLEKAILNLSKAIDQEFGATQPTLEAHQSKVGSLASASPHDRVLDIPTTQRQTACGTVGKQCCLYINNSEDIMSDIQRIKDISENMKNIPLFDW

SEQ ID NO: 620 - protein, 451 aa, Pithecia
HLLAPVFRTLSILTNQSNCWLCEHLDNAEEPELVFVPASASTWWTYSGQWIYQRVWHLQAEVQNHSTSSYDKVTQHWEAFMEAQGLSFAQVRLLEGNFSLCVENKNGTGPFLGNIPKQYCIQTLWFDSTDGTFTPSIDVTKESRNDNDDTSVYLHTRQCPWFADCTNWTWNSSTVPLIGLPSTQDYQWVDRNSGLTWSGNDTCLYSCQNQTKGLLYQLFRNIFCSYGLTEAHGKWRCADANITNDKDQNGHQTPTWWLTVANLTLSVNNSGLFILCGNGVYKGFPPKWSGRCGLGRLVPSLTRYLTLNASQITNLRSFIHKVTPHRRTKRDTDNPPLYYNPKDNSTIRALFPSLGTSDLEKAILNLSKAIEQEFSATQPNLEAHQSKVSSLASASPNDRVLDIPTTQRQTACGTVGKQCCLYINNSEDIMSDIQRIKDISENMKNVPLFDW

SEQ ID NO: 621 - protein, 460 aa, Felis catus
YPLPPLFQTLATLANLSDCWLCQHLDNAQEPELVFVPAHASTWWTHSGQWMHKREWYPQTRGHNHSTSSYGRVLWHWETSAEAQGLSLTQVRLLEGNFSVCIENKNGTGPFLGDVPKQYCNQTVWFDSTDGTFRPSIDVANESKTDYYDANVCLVTGQYSWFAGHTTGTWNSSPFPLVGLPNTQDYIWVDQNSGMTWLGNDTYLYSCQNQTKGLLYQIFRNLFCSYRLTEAHGKWRCADANITNDKGHGGHPMPAWWVTRSTLTLSVNNSGLFILCGNKVYKEFPPNWSGRCGLGYLAPSVSQYPAFNGSQITGVGSLIHKVAPHRRTQRDVIDPPPVYHNPNSLRALFSRLGTSDLEEAILNISKATEQGLAATVQTSEARQSRVSSLLSALQNHHLDLSAAQQGRTCTIVGNQCCLYVNKSKEVRFLLNSVKERIDSRRRMRELAFNWTDLVSGVRDW

SEQ ID NO: 622 - protein, 40 aa, Homo sapiens
GTYDLEKAILNISKAMEQEFSATKQTLEAHQSKVSSLASA

SEQ ID NO: 623 - protein, 10 aa, Homo sapiens
IPTTQRQTAC

SEQ ID NO: 624 - protein, 31 aa, Homo sapiens
YSEEIKSNIQRLHEASENLKNVPLLDWQGIF

SEQ ID NO: 625 - protein, 131 aa, Homo sapiens
RQTACGTVGKQCCLYINYSEEIKSNIQRLHEASENLKNVPLLDWQGIFAKVGDWFRSWGYVLLIVLFCLFIFVLIYVRVFRKSRRSLNSQPLNLALSPQQSAQLLVSETSCQVSNRAMKGLTTHQYDTSLL

SEQ ID NO: 626 - protein, 130 aa, Homo sapiens
QTACGTVGKQCCLYINYSEEIKSNIQRLHEASENLKNVPLLDWQGIFAKVGDWFRSWGYVLLIVLFCLFIFVLIYVRVFRKSRRSLNSQPLNLALSPQQSAQLLVSETSCQVSNRAMKGLTTHQYDTSLL

SEQ ID NO: 627 - protein, 163 aa, Homo sapiens
ATKQTLEAHQSKVSSLASASRKDHVLDIPTTQRQTACGTVGKQCCLYINYSEEIKSNIQRLHEASENLKNVPLLDWQGIFAKVGDWFRSWGYVLLIVLFCLFIFVLIYVRVFRKSRRSLNSQPLNLALSPQQSAQLLVSETSCQVSNRAMKGLTTHQYDTSLL

SEQ ID NO: 628 - protein, 162 aa, Homo sapiens
TKQTLEAHQSKVSSLASASRKDHVLDIPTTQRQTACGTVGKQCCLYINYSEEIKSNIQRLHEASENLKNVPLLDWQGIFAKVGDWFRSWGYVLLIVLFCLFIFVLIYVRVFRKSRRSLNSQPLNLALSPQQSAQLLVSETSCQVSNRAMKGLTTHQYDTSLL

SEQ ID NO: 629 - protein, 161 aa, Homo sapiens
KQTLEAHQSKVSSLASASRKDHVLDIPTTQRQTACGTVGKQCCLYINYSEEIKSNIQRLHEASENLKNVPLLDWQGIFAKVGDWFRSWGYVLLIVLFCLFIFVLIYVRVFRKSRRSLNSQPLNLALSPQQSAQLLVSETSCQVSNRAMKGLTTHQYDTSLL

SEQ ID NO: 630 - protein, 160 aa, Homo sapiens
QTLEAHQSKVSSLASASRKDHVLDIPTTQRQTACGTVGKQCCLYINYSEEIKSNIQRLHEASENLKNVPLLDWQGIFAKVGDWFRSWGYVLLIVLFCLFIFVLIYVRVFRKSRRSLNSQPLNLALSPQQSAQLLVSETSCQVSNRAMKGLTTHQYDTSLL

SEQ ID NO: 631 - protein, 159 aa, Homo sapiens
TLEAHQSKVSSLASASRKDHVLDIPTTQRQTACGTVGKQCCLYINYSEEIKSNIQRLHEASENLKNVPLLDWQGIFAKVGDWFRSWGYVLLIVLFCLFIFVLIYVRVFRKSRRSLNSQPLNLALSPQQSAQLLVSETSCQVSNRAMKGLTTHQYDTSLL

SEQ ID NO: 632 - protein, 158 aa, Homo sapiens
LEAHQSKVSSLASASRKDHVLDIPTTQRQTACGTVGKQCCLYINYSEEIKSNIQRLHEASENLKNVPLLDWQGIFAKVGDWFRSWGYVLLIVLFCLFIFVLIYVRVFRKSRRSLNSQPLNLALSPQQSAQLLVSETSCQVSNRAMKGLTTHQYDTSLL

SEQ ID NO: 633 - protein, 157 aa, Homo sapiens
EAHQSKVSSLASASRKDHVLDIPTTQRQTACGTVGKQCCLYINYSEEIKSNIQRLHEASENLKNVPLLDWQGIFAKVGDWFRSWGYVLLIVLFCLFIFVLIYVRVFRKSRRSLNSQPLNLALSPQQSAQLLVSETSCQVSNRAMKGLTTHQYDTSLL

SEQ ID NO: 634 - protein, 156 aa, Homo sapiens
AHQSKVSSLASASRKDHVLDIPTTQRQTACGTVGKQCCLYINYSEEIKSNIQRLHEASENLKNVPLLDWQGIFAKVGDWFRSWGYVLLIVLFCLFIFVLIYVRVFRKSRRSLNSQPLNLALSPQQSAQLLVSETSCQVSNRAMKGLTTHQYDTSLL

SEQ ID NO: 635 - protein, 155 aa, Homo sapiens
HQSKVSSLASASRKDHVLDIPTTQRQTACGTVGKQCCLYINYSEEIKSNIQRLHEASENLKNVPLLDWQGIFAKVGDWFRSWGYVLLIVLFCLFIFVLIYVRVFRKSRRSLNSQPLNLALSPQQSAQLLVSETSCQVSNRAMKGLTTHQYDTSLL

SEQ ID NO: 636 - protein, 154 aa, Homo sapiens
QSKVSSLASASRKDHVLDIPTTQRQTACGTVGKQCCLYINYSEEIKSNIQRLHEASENLKNVPLLDWQGIFAKVGDWFRSWGYVLLIVLFCLFIFVLIYVRVFRKSRRSLNSQPLNLALSPQQSAQLLVSETSCQVSNRAMKGLTTHQYDTSLL

SEQ ID NO: 637 - protein, 153 aa, Homo sapiens
SKVSSLASASRKDHVLDIPTTQRQTACGTVGKQCCLYINYSEEIKSNIQRLHEASENLKNVPLLDWQGIFAKVGDWFRSWGYVLLIVLFCLFIFVLIYVRVFRKSRRSLNSQPLNLALSPQQSAQLLVSETSCQVSNRAMKGLTTHQYDTSLL

SEQ ID NO: 638 - protein, 152 aa, Homo sapiens
KVSSLASASRKDHVLDIPTTQRQTACGTVGKQCCLYINYSEEIKSNIQRLHEASENLKNVPLLDWQGIFAKVGDWFRSWGYVLLIVLFCLFIFVLIYVRVFRKSRRSLNSQPLNLALSPQQSAQLLVSETSCQVSNRAMKGLTTHQYDTSLL

SEQ ID NO: 639 - protein, 151 aa, Homo sapiens
VSSLASASRKDHVLDIPTTQRQTACGTVGKQCCLYINYSEEIKSNIQRLHEASENLKNVPLLDWQGIFAKVGDWFRSWGYVLLIVLFCLFIFVLIYVRVFRKSRRSLNSQPLNLALSPQQSAQLLVSETSCQVSNRAMKGLTTHQYDTSLL

SEQ ID NO: 640 - protein, 150 aa, Homo sapiens
SSLASASRKDHVLDIPTTQRQTACGTVGKQCCLYINYSEEIKSNIQRLHEASENLKNVPLLDWQGIFAKVGDWFRSWGYVLLIVLFCLFIFVLIYVRVFRKSRRSLNSQPLNLALSPQQSAQLLVSETSCQVSNRAMKGLTTHQYDTSLL

SEQ ID NO: 641 - protein, 149 aa, Homo sapiens
SLASASRKDHVLDIPTTQRQTACGTVGKQCCLYINYSEEIKSNIQRLHEASENLKNVPLLDWQGIFAKVGDWFRSWGYVLLIVLFCLFIFVLIYVRVFRKSRRSLNSQPLNLALSPQQSAQLLVSETSCQVSNRAMKGLTTHQYDTSLL

SEQ ID NO: 642 - protein, 148 aa, Homo sapiens
LASASRKDHVLDIPTTQRQTACGTVGKQCCLYINYSEEIKSNIQRLHEASENLKNVPLLDWQGIFAKVGDWFRSWGYVLLIVLFCLFIFVLIYVRVFRKSRRSLNSQPLNLALSPQQSAQLLVSETSCQVSNRAMKGLTTHQYDTSLL

SEQ ID NO: 643 - protein, 147 aa, Homo sapiens
ASASRKDHVLDIPTTQRQTACGTVGKQCCLYINYSEEIKSNIQRLHEASENLKNVPLLDWQGIFAKVGDWFRSWGYVLLIVLFCLFIFVLIYVRVFRKSRRSLNSQPLNLALSPQQSAQLLVSETSCQVSNRAMKGLTTHQYDTSLL

SEQ ID NO: 644 - protein, 146 aa, Homo sapiens
SASRKDHVLDIPTTQRQTACGTVGKQCCLYINYSEEIKSNIQRLHEASENLKNVPLLDWQGIFAKVGDWFRSWGYVLLIVLFCLFIFVLIYVRVFRKSRRSLNSQPLNLALSPQQSAQLLVSETSCQVSNRAMKGLTTHQYDTSLL

SEQ ID NO: 645 - protein, 145 aa, Homo sapiens
ASRKDHVLDIPTTQRQTACGTVGKQCCLYINYSEEIKSNIQRLHEASENLKNVPLLDWQGIFAKVGDWFRSWGYVLLIVLFCLFIFVLIYVRVFRKSRRSLNSQPLNLALSPQQSAQLLVSETSCQVSNRAMKGLTTHQYDTSLL

SEQ ID NO: 646 - protein, 144 aa, Homo sapiens
SRKDHVLDIPTTQRQTACGTVGKQCCLYINYSEEIKSNIQRLHEASENLKNVPLLDWQGIFAKVGDWFRSWGYVLLIVLFCLFIFVLIYVRVFRKSRRSLNSQPLNLALSPQQSAQLLVSETSCQVSNRAMKGLTTHQYDTSLL

SEQ ID NO: 647 - protein, 143 aa, Homo sapiens
RKDHVLDIPTTQRQTACGTVGKQCCLYINYSEEIKSNIQRLHEASENLKNVPLLDWQGIFAKVGDWFRSWGYVLLIVLFCLFIFVLIYVRVFRKSRRSLNSQPLNLALSPQQSAQLLVSETSCQVSNRAMKGLTTHQYDTSLL

SEQ ID NO: 648 - protein, 113 aa, Homo sapiens
SEEIKSNIQRLHEASENLKNVPLLDWQGIFAKVGDWFRSWGYVLLIVLFCLFIFVLIYVRVFRKSRRSLNSQPLNLALSPQQSAQLLVSETSCQVSNRAMKGLTTHQYDTSLL

SEQ ID NO: 649 - protein, 112 aa, Homo sapiens
EEIKSNIQRLHEASENLKNVPLLDWQGIFAKVGDWFRSWGYVLLIVLFCLFIFVLIYVRVFRKSRRSLNSQPLNLALSPQQSAQLLVSETSCQVSNRAMKGLTTHQYDTSLL

SEQ ID NO: 650 - protein, 111 aa, Homo sapiens
EIKSNIQRLHEASENLKNVPLLDWQGIFAKVGDWFRSWGYVLLIVLFCLFIFVLIYVRVFRKSRRSLNSQPLNLALSPQQSAQLLVSETSCQVSNRAMKGLTTHQYDTSLL

SEQ ID NO: 651 - protein, 110 aa, Homo sapiens
IKSNIQRLHEASENLKNVPLLDWQGIFAKVGDWFRSWGYVLLIVLFCLFIFVLIYVRVFRKSRRSLNSQPLNLALSPQQSAQLLVSETSCQVSNRAMKGLTTHQYDTSLL

SEQ ID NO: 652 - protein, 109 aa, Homo sapiens
KSNIQRLHEASENLKNVPLLDWQGIFAKVGDWFRSWGYVLLIVLFCLFIFVLIYVRVFRKSRRSLNSQPLNLALSPQQSAQLLVSETSCQVSNRAMKGLTTHQYDTSLL

SEQ ID NO: 653 - protein, 108 aa, Homo sapiens
SNIQRLHEASENLKNVPLLDWQGIFAKVGDWFRSWGYVLLIVLFCLFIFVLIYVRVFRKSRRSLNSQPLNLALSPQQSAQLLVSETSCQVSNRAMKGLTTHQYDTSLL

SEQ ID NO: 654 - protein, 107 aa, Homo sapiens
NIQRLHEASENLKNVPLLDWQGIFAKVGDWFRSWGYVLLIVLFCLFIFVLIYVRVFRKSRRSLNSQPLNLALSPQQSAQLLVSETSCQVSNRAMKGLTTHQYDTSLL

SEQ ID NO: 655 - protein, 106 aa, Homo sapiens
IQRLHEASENLKNVPLLDWQGIFAKVGDWFRSWGYVLLIVLFCLFIFVLIYVRVFRKSRRSLNSQPLNLALSPQQSAQLLVSETSCQVSNRAMKGLTTHQYDTSLL

SEQ ID NO: 656 - protein, 105 aa, Homo sapiens
QRLHEASENLKNVPLLDWQGIFAKVGDWFRSWGYVLLIVLFCLFIFVLIYVRVFRKSRRSLNSQPLNLALSPQQSAQLLVSETSCQVSNRAMKGLTTHQYDTSLL

SEQ ID NO: 657 - protein, 104 aa, Homo sapiens
RLHEASENLKNVPLLDWQGIFAKVGDWFRSWGYVLLIVLFCLFIFVLIYVRVFRKSRRSLNSQPLNLALSPQQSAQLLVSETSCQVSNRAMKGLTTHQYDTSLL

SEQ ID NO: 658 - protein, 103 aa, Homo sapiens
LHEASENLKNVPLLDWQGIFAKVGDWFRSWGYVLLIVLFCLFIFVLIYVRVFRKSRRSLNSQPLNLALSPQQSAQLLVSETSCQVSNRAMKGLTTHQYDTSLL

SEQ ID NO: 659 - protein, 102 aa, Homo sapiens
HEASENLKNVPLLDWQGIFAKVGDWFRSWGYVLLIVLFCLFIFVLIYVRVFRKSRRSLNSQPLNLALSPQQSAQLLVSETSCQVSNRAMKGLTTHQYDTSLL

SEQ ID NO: 660 - protein, 101 aa, Homo sapiens
EASENLKNVPLLDWQGIFAKVGDWFRSWGYVLLIVLFCLFIFVLIYVRVFRKSRRSLNSQPLNLALSPQQSAQLLVSETSCQVSNRAMKGLTTHQYDTSLL

SEQ ID NO: 661 - protein, 100 aa, Homo sapiens
ASENLKNVPLLDWQGIFAKVGDWFRSWGYVLLIVLFCLFIFVLIYVRVFRKSRRSLNSQPLNLALSPQQSAQLLVSETSCQVSNRAMKGLTTHQYDTSLL

SEQ ID NO: 662 - protein, 99 aa, Homo sapiens
SENLKNVPLLDWQGIFAKVGDWFRSWGYVLLIVLFCLFIFVLIYVRVFRKSRRSLNSQPLNLALSPQQSAQLLVSETSCQVSNRAMKGLTTHQYDTSLL

SEQ ID NO: 663 - protein, 98 aa, Homo sapiens
ENLKNVPLLDWQGIFAKVGDWFRSWGYVLLIVLFCLFIFVLIYVRVFRKSRRSLNSQPLNLALSPQQSAQLLVSETSCQVSNRAMKGLTTHQYDTSLL

SEQ ID NO: 664 - protein, 97 aa, Homo sapiens
NLKNVPLLDWQGIFAKVGDWFRSWGYVLLIVLFCLFIFVLIYVRVFRKSRRSLNSQPLNLALSPQQSAQLLVSETSCQVSNRAMKGLTTHQYDTSLL

SEQ ID NO: 665 - protein, 96 aa, Homo sapiens
LKNVPLLDWQGIFAKVGDWFRSWGYVLLIVLFCLFIFVLIYVRVFRKSRRSLNSQPLNLALSPQQSAQLLVSETSCQVSNRAMKGLTTHQYDTSLL

SEQ ID NO: 666 - protein, 95 aa, Homo sapiens
KNVPLLDWQGIFAKVGDWFRSWGYVLLIVLFCLFIFVLIYVRVFRKSRRSLNSQPLNLALSPQQSAQLLVSETSCQVSNRAMKGLTTHQYDTSLL

SEQ ID NO: 667 - protein, 94 aa, Homo sapiens
NVPLLDWQGIFAKVGDWFRSWGYVLLIVLFCLFIFVLIYVRVFRKSRRSLNSQPLNLALSPQQSAQLLVSETSCQVSNRAMKGLTTHQYDTSLL

SEQ ID NO: 668 - protein, 93 aa, Homo sapiens
VPLLDWQGIFAKVGDWFRSWGYVLLIVLFCLFIFVLIYVRVFRKSRRSLNSQPLNLALSPQQSAQLLVSETSCQVSNRAMKGLTTHQYDTSLL

SEQ ID NO: 669 - DNA, 757 bp, Homo sapiens
gtcctgccctcgtcccgaagtttcctgggattggctgcctgccccgcggccctcctcccagccccgccctcgcccagagtcttccctgcgccgaaagcgcaggtatgttcctagtcttgagcgggagaaaatcacccagctcggagcacctggccagtgggaccggtgggttcctggtgcctgaatccggctgtccgctctgcggtgccccgccccgccccaacccaggatcttcccagccccgctccgccccaacccaggatcttcccagccctcgtgtgtccccgctcacttcagttcccgccgcgagccttcttcttggtcttctggcctggcggcgatcgtcggccagtttatccctcggagttgcactgtgagtgcgtttctgccctttggtctccggcggggagggctcccaggcagggtctgggctcgccccgtgtcccctcgagctttgcccgccccgagctcctctgctgcccgcggccagaacggaggggtaaagcagccctcggcggcccagggggcggacggccgtgcccgtcccagggccgcgcgaggcacaggcgctgcgtcctgcggagccgctgggagaatcccggggcaggtcccggcgcggtaacaagtttgcgctttgcctccctagggcagacacgccgctactttgtagcgggtttcgggcgggccacgcgtgcggcgacaggaacccaaccccggccgaccttgggctccaggaattcgttgtctacgtctgcgg

SEQ ID NO: 670 - protein, 354 aa, Homo sapiens
LLAPVFRTLSILTNQSNCWLCEHLDNAEQPELVFVPASASTWWTYSGQWMYERVWYPQAEVQNHSTSSYRKVTWHWEASMEAQGLSFAQVRLLEGNFSLCVENKNGSGPFLGNIPKQYCNQILWFDSTDGTFMPSIDVTNESRNDDDDTSVCLGTRQCSWFAGCTNRTWNSSAVPLIGLPNTQDYKWVDRNSGLTWSGNDTCLYSCQNQTKGLLYQLFRNLFCSYGLTEAHGKWRCADASITNDKGHDGHRTPTWWLTGSNLTLSVNNSGLFFLCGNGVYKGFPPKWSGRCGLGYLVPSLTRYLTLNASQITNLRSFIHKVTPHRCTQGDTDNPPLYCNPKDNSTIRALFPSLG

SEQ ID NO: 671 - protein, 355 aa, Homo sapiens
LLAPVFRTLSILTNQSNCWLCEHLDNAEQPELVFVPASASTWWTYSGQWMYERVWYPQAEVQNHSTSSYRKVTWHWEASMEAQGLSFAQVRLLEGNFSLCVENKNGSGPFLGNIPKQYCNQILWFDSTDGTFMPSIDVTNESRNDDDDTSVCLGTRQCSWFAGCTNRTWNSSAVPLIGLPNTQDYKWVDRNSGLTWSGNDTCLYSCQNQTKGLLYQLFRNLFCSYGLTEAHGKWRCADASITNDKGHDGHRTPTWWLTGSNLTLSVNNSGLFFLCGNGVYKGFPPKWSGRCGLGYLVPSLTRYLTLNASQITNLRSFIHKVTPHRCTQGDTDNPPLYCNPKDNSTIRALFPSLGT

SEQ ID NO: 672 - protein, 356 aa, Homo sapiens
LLAPVFRTLSILTNQSNCWLCEHLDNAEQPELVFVPASASTWWTYSGQWMYERVWYPQAEVQNHSTSSYRKVTWHWEASMEAQGLSFAQVRLLEGNFSLCVENKNGSGPFLGNIPKQYCNQILWFDSTDGTFMPSIDVTNESRNDDDDTSVCLGTRQCSWFAGCTNRTWNSSAVPLIGLPNTQDYKWVDRNSGLTWSGNDTCLYSCQNQTKGLLYQLFRNLFCSYGLTEAHGKWRCADASITNDKGHDGHRTPTWWLTGSNLTLSVNNSGLFFLCGNGVYKGFPPKWSGRCGLGYLVPSLTRYLTLNASQITNLRSFIHKVTPHRCTQGDTDNPPLYCNPKDNSTIRALFPSLGTY

SEQ ID NO: 673 - protein, 357 aa, Homo sapiens
LLAPVFRTLSILTNQSNCWLCEHLDNAEQPELVFVPASASTWWTYSGQWMYERVWYPQAEVQNHSTSSYRKVTWHWEASMEAQGLSFAQVRLLEGNFSLCVENKNGSGPFLGNIPKQYCNQILWFDSTDGTFMPSIDVTNESRNDDDDTSVCLGTRQCSWFAGCTNRTWNSSAVPLIGLPNTQDYKWVDRNSGLTWSGNDTCLYSCQNQTKGLLYQLFRNLFCSYGLTEAHGKWRCADASITNDKGHDGHRTPTWWLTGSNLTLSVNNSGLFFLCGNGVYKGFPPKWSGRCGLGYLVPSLTRYLTLNASQITNLRSFIHKVTPHRCTQGDTDNPPLYCNPKDNSTIRALFPSLGTYD

SEQ ID NO: 674 - protein, 358 aa, Homo sapiens
LLAPVFRTLSILTNQSNCWLCEHLDNAEQPELVFVPASASTWWTYSGQWMYERVWYPQAEVQNHSTSSYRKVTWHWEASMEAQGLSFAQVRLLEGNFSLCVENKNGSGPFLGNIPKQYCNQILWFDSTDGTFMPSIDVTNESRNDDDDTSVCLGTRQCSWFAGCTNRTWNSSAVPLIGLPNTQDYKWVDRNSGLTWSGNDTCLYSCQNQTKGLLYQLFRNLFCSYGLTEAHGKWRCADASITNDKGHDGHRTPTWWLTGSNLTLSVNNSGLFFLCGNGVYKGFPPKWSGRCGLGYLVPSLTRYLTLNASQITNLRSFIHKVTPHRCTQGDTDNPPLYCNPKDNSTIRALFPSLGTYDL

SEQ ID NO: 675 - protein, 359 aa, Homo sapiens
LLAPVFRTLSILTNQSNCWLCEHLDNAEQPELVFVPASASTWWTYSGQWMYERVWYPQAEVQNHSTSSYRKVTWHWEASMEAQGLSFAQVRLLEGNFSLCVENKNGSGPFLGNIPKQYCNQILWFDSTDGTFMPSIDVTNESRNDDDDTSVCLGTRQCSWFAGCTNRTWNSSAVPLIGLPNTQDYKWVDRNSGLTWSGNDTCLYSCQNQTKGLLYQLFRNLFCSYGLTEAHGKWRCADASITNDKGHDGHRTPTWWLTGSNLTLSVNNSGLFFLCGNGVYKGFPPKWSGRCGLGYLVPSLTRYLTLNASQITNLRSFIHKVTPHRCTQGDTDNPPLYCNPKDNSTIRALFPSLGTYDLE

SEQ ID NO: 676 - protein, 360 aa, Homo sapiens
LLAPVFRTLSILTNQSNCWLCEHLDNAEQPELVFVPASASTWWTYSGQWMYERVWYPQAEVQNHSTSSYRKVTWHWEASMEAQGLSFAQVRLLEGNFSLCVENKNGSGPFLGNIPKQYCNQILWFDSTDGTFMPSIDVTNESRNDDDDTSVCLGTRQCSWFAGCTNRTWNSSAVPLIGLPNTQDYKWVDRNSGLTWSGNDTCLYSCQNQTKGLLYQLFRNLFCSYGLTEAHGKWRCADASITNDKGHDGHRTPTWWLTGSNLTLSVNNSGLFFLCGNGVYKGFPPKWSGRCGLGYLVPSLTRYLTLNASQITNLRSFIHKVTPHRCTQGDTDNPPLYCNPKDNSTIRALFPSLGTYDLEK

SEQ ID NO: 677 - protein, 361 aa, Homo sapiens
LLAPVFRTLSILTNQSNCWLCEHLDNAEQPELVFVPASASTWWTYSGQWMYERVWYPQAEVQNHSTSSYRKVTWHWEASMEAQGLSFAQVRLLEGNFSLCVENKNGSGPFLGNIPKQYCNQILWFDSTDGTFMPSIDVTNESRNDDDDTSVCLGTRQCSWFAGCTNRTWNSSAVPLIGLPNTQDYKWVDRNSGLTWSGNDTCLYSCQNQTKGLLYQLFRNLFCSYGLTEAHGKWRCADASITNDKGHDGHRTPTWWLTGSNLTLSVNNSGLFFLCGNGVYKGFPPKWSGRCGLGYLVPSLTRYLTLNASQITNLRSFIHKVTPHRCTQGDTDNPPLYCNPKDNSTIRALFPSLGTYDLEKA

SEQ ID NO: 678 - protein, 362 aa, Homo sapiens
LLAPVFRTLSILTNQSNCWLCEHLDNAEQPELVFVPASASTWWTYSGQWMYERVWYPQAEVQNHSTSSYRKVTWHWEASMEAQGLSFAQVRLLEGNFSLCVENKNGSGPFLGNIPKQYCNQILWFDSTDGTFMPSIDVTNESRNDDDDTSVCLGTRQCSWFAGCTNRTWNSSAVPLIGLPNTQDYKWVDRNSGLTWSGNDTCLYSCQNQTKGLLYQLFRNLFCSYGLTEAHGKWRCADASITNDKGHDGHRTPTWWLTGSNLTLSVNNSGLFFLCGNGVYKGFPPKWSGRCGLGYLVPSLTRYLTLNASQITNLRSFIHKVTPHRCTQGDTDNPPLYCNPKDNSTIRALFPSLGTYDLEKAI

SEQ ID NO: 679 - protein, 363 aa, Homo sapiens
LLAPVFRTLSILTNQSNCWLCEHLDNAEQPELVFVPASASTWWTYSGQWMYERVWYPQAEVQNHSTSSYRKVTWHWEASMEAQGLSFAQVRLLEGNFSLCVENKNGSGPFLGNIPKQYCNQILWFDSTDGTFMPSIDVTNESRNDDDDTSVCLGTRQCSWFAGCTNRTWNSSAVPLIGLPNTQDYKWVDRNSGLTWSGNDTCLYSCQNQTKGLLYQLFRNLFCSYGLTEAHGKWRCADASITNDKGHDGHRTPTWWLTGSNLTLSVNNSGLFFLCGNGVYKGFPPKWSGRCGLGYLVPSLTRYLTLNASQITNLRSFIHKVTPHRCTQGDTDNPPLYCNPKDNSTIRALFPSLGTYDLEKAIL

SEQ ID NO: 680 - protein, 364 aa, Homo sapiens
LLAPVFRTLSILTNQSNCWLCEHLDNAEQPELVFVPASASTWWTYSGQWMYERVWYPQAEVQNHSTSSYRKVTWHWEASMEAQGLSFAQVRLLEGNFSLCVENKNGSGPFLGNIPKQYCNQILWFDSTDGTFMPSIDVTNESRNDDDDTSVCLGTRQCSWFAGCTNRTWNSSAVPLIGLPNTQDYKWVDRNSGLTWSGNDTCLYSCQNQTKGLLYQLFRNLFCSYGLTEAHGKWRCADASITNDKGHDGHRTPTWWLTGSNLTLSVNNSGLFFLCGNGVYKGFPPKWSGRCGLGYLVPSLTRYLTLNASQITNLRSFIHKVTPHRCTQGDTDNPPLYCNPKDNSTIRALFPSLGTYDLEKAILN

SEQ ID NO: 681 - protein, 365 aa, Homo sapiens
LLAPVFRTLSILTNQSNCWLCEHLDNAEQPELVFVPASASTWWTYSGQWMYERVWYPQAEVQNHSTSSYRKVTWHWEASMEAQGLSFAQVRLLEGNFSLCVENKNGSGPFLGNIPKQYCNQILWFDSTDGTFMPSIDVTNESRNDDDDTSVCLGTRQCSWFAGCTNRTWNSSAVPLIGLPNTQDYKWVDRNSGLTWSGNDTCLYSCQNQTKGLLYQLFRNLFCSYGLTEAHGKWRCADASITNDKGHDGHRTPTWWLTGSNLTLSVNNSGLFFLCGNGVYKGFPPKWSGRCGLGYLVPSLTRYLTLNASQITNLRSFIHKVTPHRCTQGDTDNPPLYCNPKDNSTIRALFPSLGTYDLEKAILNI

SEQ ID NO: 682 - protein, 366 aa, Homo sapiens
LLAPVFRTLSILTNQSNCWLCEHLDNAEQPELVFVPASASTWWTYSGQWMYERVWYPQAEVQNHSTSSYRKVTWHWEASMEAQGLSFAQVRLLEGNFSLCVENKNGSGPFLGNIPKQYCNQILWFDSTDGTFMPSIDVTNESRNDDDDTSVCLGTRQCSWFAGCTNRTWNSSAVPLIGLPNTQDYKWVDRNSGLTWSGNDTCLYSCQNQTKGLLYQLFRNLFCSYGLTEAHGKWRCADASITNDKGHDGHRTPTWWLTGSNLTLSVNNSGLFFLCGNGVYKGFPPKWSGRCGLGYLVPSLTRYLTLNASQITNLRSFIHKVTPHRCTQGDTDNPPLYCNPKDNSTIRALFPSLGTYDLEKAILNIS

SEQ ID NO: 683 - protein, 367 aa, Homo sapiens
LLAPVFRTLSILTNQSNCWLCEHLDNAEQPELVFVPASASTWWTYSGQWMYERVWYPQAEVQNHSTSSYRKVTWHWEASMEAQGLSFAQVRLLEGNFSLCVENKNGSGPFLGNIPKQYCNQILWFDSTDGTFMPSIDVTNESRNDDDDTSVCLGTRQCSWFAGCTNRTWNSSAVPLIGLPNTQDYKWVDRNSGLTWSGNDTCLYSCQNQTKGLLYQLFRNLFCSYGLTEAHGKWRCADASITNDKGHDGHRTPTWWLTGSNLTLSVNNSGLFFLCGNGVYKGFPPKWSGRCGLGYLVPSLTRYLTLNASQITNLRSFIHKVTPHRCTQGDTDNPPLYCNPKDNSTIRALFPSLGTYDLEKAILNISK

SEQ ID NO: 684 - protein, 368 aa, Homo sapiens
LLAPVFRTLSILTNQSNCWLCEHLDNAEQPELVFVPASASTWWTYSGQWMYERVWYPQAEVQNHSTSSYRKVTWHWEASMEAQGLSFAQVRLLEGNFSLCVENKNGSGPFLGNIPKQYCNQILWFDSTDGTFMPSIDVTNESRNDDDDTSVCLGTRQCSWFAGCTNRTWNSSAVPLIGLPNTQDYKWVDRNSGLTWSGNDTCLYSCQNQTKGLLYQLFRNLFCSYGLTEAHGKWRCADASITNDKGHDGHRTPTWWLTGSNLTLSVNNSGLFFLCGNGVYKGFPPKWSGRCGLGYLVPSLTRYLTLNASQITNLRSFIHKVTPHRCTQGDTDNPPLYCNPKDNSTIRALFPSLGTYDLEKAILNISKA

SEQ ID NO: 685 - protein, 369 aa, Homo sapiens
LLAPVFRTLSILTNQSNCWLCEHLDNAEQPELVFVPASASTWWTYSGQWMYERVWYPQAEVQNHSTSSYRKVTWHWEASMEAQGLSFAQVRLLEGNFSLCVENKNGSGPFLGNIPKQYCNQILWFDSTDGTFMPSIDVTNESRNDDDDTSVCLGTRQCSWFAGCTNRTWNSSAVPLIGLPNTQDYKWVDRNSGLTWSGNDTCLYSCQNQTKGLLYQLFRNLFCSYGLTEAHGKWRCADASITNDKGHDGHRTPTWWLTGSNLTLSVNNSGLFFLCGNGVYKGFPPKWSGRCGLGYLVPSLTRYLTLNASQITNLRSFIHKVTPHRCTQGDTDNPPLYCNPKDNSTIRALFPSLGTYDLEKAILNISKAM

SEQ ID NO: 686 - protein, 370 aa, Homo sapiens
LLAPVFRTLSILTNQSNCWLCEHLDNAEQPELVFVPASASTWWTYSGQWMYERVWYPQAEVQNHSTSSYRKVTWHWEASMEAQGLSFAQVRLLEGNFSLCVENKNGSGPFLGNIPKQYCNQILWFDSTDGTFMPSIDVTNESRNDDDDTSVCLGTRQCSWFAGCTNRTWNSSAVPLIGLPNTQDYKWVDRNSGLTWSGNDTCLYSCQNQTKGLLYQLFRNLFCSYGLTEAHGKWRCADASITNDKGHDGHRTPTWWLTGSNLTLSVNNSGLFFLCGNGVYKGFPPKWSGRCGLGYLVPSLTRYLTLNASQITNLRSFIHKVTPHRCTQGDTDNPPLYCNPKDNSTIRALFPSLGTYDLEKAILNISKAME

SEQ ID NO: 687 - protein, 371 aa, Homo sapiens
LLAPVFRTLSILTNQSNCWLCEHLDNAEQPELVFVPASASTWWTYSGQWMYERVWYPQAEVQNHSTSSYRKVTWHWEASMEAQGLSFAQVRLLEGNFSLCVENKNGSGPFLGNIPKQYCNQILWFDSTDGTFMPSIDVTNESRNDDDDTSVCLGTRQCSWFAGCTNRTWNSSAVPLIGLPNTQDYKWVDRNSGLTWSGNDTCLYSCQNQTKGLLYQLFRNLFCSYGLTEAHGKWRCADASITNDKGHDGHRTPTWWLTGSNLTLSVNNSGLFFLCGNGVYKGFPPKWSGRCGLGYLVPSLTRYLTLNASQITNLRSFIHKVTPHRCTQGDTDNPPLYCNPKDNSTIRALFPSLGTYDLEKAILNISKAMEQ

SEQ ID NO: 688 - protein, 372 aa, Homo sapiens
LLAPVFRTLSILTNQSNCWLCEHLDNAEQPELVFVPASASTWWTYSGQWMYERVWYPQAEVQNHSTSSYRKVTWHWEASMEAQGLSFAQVRLLEGNFSLCVENKNGSGPFLGNIPKQYCNQILWFDSTDGTFMPSIDVTNESRNDDDDTSVCLGTRQCSWFAGCTNRTWNSSAVPLIGLPNTQDYKWVDRNSGLTWSGNDTCLYSCQNQTKGLLYQLFRNLFCSYGLTEAHGKWRCADASITNDKGHDGHRTPTWWLTGSNLTLSVNNSGLFFLCGNGVYKGFPPKWSGRCGLGYLVPSLTRYLTLNASQITNLRSFIHKVTPHRCTQGDTDNPPLYCNPKDNSTIRALFPSLGTYDLEKAILNISKAMEQE

SEQ ID NO: 689 - protein, 373 aa, Homo sapiens
LLAPVFRTLSILTNQSNCWLCEHLDNAEQPELVFVPASASTWWTYSGQWMYERVWYPQAEVQNHSTSSYRKVTWHWEASMEAQGLSFAQVRLLEGNFSLCVENKNGSGPFLGNIPKQYCNQILWFDSTDGTFMPSIDVTNESRNDDDDTSVCLGTRQCSWFAGCTNRTWNSSAVPLIGLPNTQDYKWVDRNSGLTWSGNDTCLYSCQNQTKGLLYQLFRNLFCSYGLTEAHGKWRCADASITNDKGHDGHRTPTWWLTGSNLTLSVNNSGLFFLCGNGVYKGFPPKWSGRCGLGYLVPSLTRYLTLNASQITNLRSFIHKVTPHRCTQGDTDNPPLYCNPKDNSTIRALFPSLGTYDLEKAILNISKAMEQEF

SEQ ID NO: 690 - protein, 356 aa, Homo sapiens
QHLLAPVFRTLSILTNQSNCWLCEHLDNAEQPELVFVPASASTWWTYSGQWMYERVWYPQAEVQNHSTSSYRKVTWHWEASMEAQGLSFAQVRLLEGNFSLCVENKNGSGPFLGNIPKQYCNQILWFDSTDGTFMPSIDVTNESRNDDDDTSVCLGTRQCSWFAGCTNRTWNSSAVPLIGLPNTQDYKWVDRNSGLTWSGNDTCLYSCQNQTKGLLYQLFRNLFCSYGLTEAHGKWRCADASITNDKGHDGHRTPTWWLTGSNLTLSVNNSGLFFLCGNGVYKGFPPKWSGRCGLGYLVPSLTRYLTLNASQITNLRSFIHKVTPHRCTQGDTDNPPLYCNPKDNSTIRALFPSLG

SEQ ID NO: 691 - protein, 357 aa, Homo sapiens
QHLLAPVFRTLSILTNQSNCWLCEHLDNAEQPELVFVPASASTWWTYSGQWMYERVWYPQAEVQNHSTSSYRKVTWHWEASMEAQGLSFAQVRLLEGNFSLCVENKNGSGPFLGNIPKQYCNQILWFDSTDGTFMPSIDVTNESRNDDDDTSVCLGTRQCSWFAGCTNRTWNSSAVPLIGLPNTQDYKWVDRNSGLTWSGNDTCLYSCQNQTKGLLYQLFRNLFCSYGLTEAHGKWRCADASITNDKGHDGHRTPTWWLTGSNLTLSVNNSGLFFLCGNGVYKGFPPKWSGRCGLGYLVPSLTRYLTLNASQITNLRSFIHKVTPHRCTQGDTDNPPLYCNPKDNSTIRALFPSLGT

SEQ ID NO: 692 - protein, 358 aa, Homo sapiens
QHLLAPVFRTLSILTNQSNCWLCEHLDNAEQPELVFVPASASTWWTYSGQWMYERVWYPQAEVQNHSTSSYRKVTWHWEASMEAQGLSFAQVRLLEGNFSLCVENKNGSGPFLGNIPKQYCNQILWFDSTDGTFMPSIDVTNESRNDDDDTSVCLGTRQCSWFAGCTNRTWNSSAVPLIGLPNTQDYKWVDRNSGLTWSGNDTCLYSCQNQTKGLLYQLFRNLFCSYGLTEAHGKWRCADASITNDKGHDGHRTPTWWLTGSNLTLSVNNSGLFFLCGNGVYKGFPPKWSGRCGLGYLVPSLTRYLTLNASQITNLRSFIHKVTPHRCTQGDTDNPPLYCNPKDNSTIRALFPSLGTY

SEQ ID NO: 693 - protein, 359 aa, Homo sapiens
QHLLAPVFRTLSILTNQSNCWLCEHLDNAEQPELVFVPASASTWWTYSGQWMYERVWYPQAEVQNHSTSSYRKVTWHWEASMEAQGLSFAQVRLLEGNFSLCVENKNGSGPFLGNIPKQYCNQILWFDSTDGTFMPSIDVTNESRNDDDDTSVCLGTRQCSWFAGCTNRTWNSSAVPLIGLPNTQDYKWVDRNSGLTWSGNDTCLYSCQNQTKGLLYQLFRNLFCSYGLTEAHGKWRCADASITNDKGHDGHRTPTWWLTGSNLTLSVNNSGLFFLCGNGVYKGFPPKWSGRCGLGYLVPSLTRYLTLNASQITNLRSFIHKVTPHRCTQGDTDNPPLYCNPKDNSTIRALFPSLGTYD

SEQ ID NO: 694 - protein, 360 aa, Homo sapiens
QHLLAPVFRTLSILTNQSNCWLCEHLDNAEQPELVFVPASASTWWTYSGQWMYERVWYPQAEVQNHSTSSYRKVTWHWEASMEAQGLSFAQVRLLEGNFSLCVENKNGSGPFLGNIPKQYCNQILWFDSTDGTFMPSIDVTNESRNDDDDTSVCLGTRQCSWFAGCTNRTWNSSAVPLIGLPNTQDYKWVDRNSGLTWSGNDTCLYSCQNQTKGLLYQLFRNLFCSYGLTEAHGKWRCADASITNDKGHDGHRTPTWWLTGSNLTLSVNNSGLFFLCGNGVYKGFPPKWSGRCGLGYLVPSLTRYLTLNASQITNLRSFIHKVTPHRCTQGDTDNPPLYCNPKDNSTIRALFPSLGTYDL

SEQ ID NO: 695 - protein, 361 aa, Homo sapiens
QHLLAPVFRTLSILTNQSNCWLCEHLDNAEQPELVFVPASASTWWTYSGQWMYERVWYPQAEVQNHSTSSYRKVTWHWEASMEAQGLSFAQVRLLEGNFSLCVENKNGSGPFLGNIPKQYCNQILWFDSTDGTFMPSIDVTNESRNDDDDTSVCLGTRQCSWFAGCTNRTWNSSAVPLIGLPNTQDYKWVDRNSGLTWSGNDTCLYSCQNQTKGLLYQLFRNLFCSYGLTEAHGKWRCADASITNDKGHDGHRTPTWWLTGSNLTLSVNNSGLFFLCGNGVYKGFPPKWSGRCGLGYLVPSLTRYLTLNASQITNLRSFIHKVTPHRCTQGDTDNPPLYCNPKDNSTIRALFPSLGTYDLE

SEQ ID NO: 696 - protein, 362 aa, Homo sapiens
QHLLAPVFRTLSILTNQSNCWLCEHLDNAEQPELVFVPASASTWWTYSGQWMYERVWYPQAEVQNHSTSSYRKVTWHWEASMEAQGLSFAQVRLLEGNFSLCVENKNGSGPFLGNIPKQYCNQILWFDSTDGTFMPSIDVTNESRNDDDDTSVCLGTRQCSWFAGCTNRTWNSSAVPLIGLPNTQDYKWVDRNSGLTWSGNDTCLYSCQNQTKGLLYQLFRNLFCSYGLTEAHGKWRCADASITNDKGHDGHRTPTWWLTGSNLTLSVNNSGLFFLCGNGVYKGFPPKWSGRCGLGYLVPSLTRYLTLNASQITNLRSFIHKVTPHRCTQGDTDNPPLYCNPKDNSTIRALFPSLGTYDLEK

SEQ ID NO: 697 - protein, 363 aa, Homo sapiens
QHLLAPVFRTLSILTNQSNCWLCEHLDNAEQPELVFVPASASTWWTYSGQWMYERVWYPQAEVQNHSTSSYRKVTWHWEASMEAQGLSFAQVRLLEGNFSLCVENKNGSGPFLGNIPKQYCNQILWFDSTDGTFMPSIDVTNESRNDDDDTSVCLGTRQCSWFAGCTNRTWNSSAVPLIGLPNTQDYKWVDRNSGLTWSGNDTCLYSCQNQTKGLLYQLFRNLFCSYGLTEAHGKWRCADASITNDKGHDGHRTPTWWLTGSNLTLSVNNSGLFFLCGNGVYKGFPPKWSGRCGLGYLVPSLTRYLTLNASQITNLRSFIHKVTPHRCTQGDTDNPPLYCNPKDNSTIRALFPSLGTYDLEKA

SEQ ID NO: 698 - protein, 364 aa, Homo sapiens
QHLLAPVFRTLSILTNQSNCWLCEHLDNAEQPELVFVPASASTWWTYSGQWMYERVWYPQAEVQNHSTSSYRKVTWHWEASMEAQGLSFAQVRLLEGNFSLCVENKNGSGPFLGNIPKQYCNQILWFDSTDGTFMPSIDVTNESRNDDDDTSVCLGTRQCSWFAGCTNRTWNSSAVPLIGLPNTQDYKWVDRNSGLTWSGNDTCLYSCQNQTKGLLYQLFRNLFCSYGLTEAHGKWRCADASITNDKGHDGHRTPTWWLTGSNLTLSVNNSGLFFLCGNGVYKGFPPKWSGRCGLGYLVPSLTRYLTLNASQITNLRSFIHKVTPHRCTQGDTDNPPLYCNPKDNSTIRALFPSLGTYDLEKAI

SEQ ID NO: 699 - protein, 365 aa, Homo sapiens
QHLLAPVFRTLSILTNQSNCWLCEHLDNAEQPELVFVPASASTWWTYSGQWMYERVWYPQAEVQNHSTSSYRKVTWHWEASMEAQGLSFAQVRLLEGNFSLCVENKNGSGPFLGNIPKQYCNQILWFDSTDGTFMPSIDVTNESRNDDDDTSVCLGTRQCSWFAGCTNRTWNSSAVPLIGLPNTQDYKWVDRNSGLTWSGNDTCLYSCQNQTKGLLYQLFRNLFCSYGLTEAHGKWRCADASITNDKGHDGHRTPTWWLTGSNLTLSVNNSGLFFLCGNGVYKGFPPKWSGRCGLGYLVPSLTRYLTLNASQITNLRSFIHKVTPHRCTQGDTDNPPLYCNPKDNSTIRALFPSLGTYDLEKAIL

SEQ ID NO: 700 - protein, 366 aa, Homo sapiens
QHLLAPVFRTLSILTNQSNCWLCEHLDNAEQPELVFVPASASTWWTYSGQWMYERVWYPQAEVQNHSTSSYRKVTWHWEASMEAQGLSFAQVRLLEGNFSLCVENKNGSGPFLGNIPKQYCNQILWFDSTDGTFMPSIDVTNESRNDDDDTSVCLGTRQCSWFAGCTNRTWNSSAVPLIGLPNTQDYKWVDRNSGLTWSGNDTCLYSCQNQTKGLLYQLFRNLFCSYGLTEAHGKWRCADASITNDKGHDGHRTPTWWLTGSNLTLSVNNSGLFFLCGNGVYKGFPPKWSGRCGLGYLVPSLTRYLTLNASQITNLRSFIHKVTPHRCTQGDTDNPPLYCNPKDNSTIRALFPSLGTYDLEKAILN

SEQ ID NO: 701 - protein, 367 aa, Homo sapiens
QHLLAPVFRTLSILTNQSNCWLCEHLDNAEQPELVFVPASASTWWTYSGQWMYERVWYPQAEVQNHSTSSYRKVTWHWEASMEAQGLSFAQVRLLEGNFSLCVENKNGSGPFLGNIPKQYCNQILWFDSTDGTFMPSIDVTNESRNDDDDTSVCLGTRQCSWFAGCTNRTWNSSAVPLIGLPNTQDYKWVDRNSGLTWSGNDTCLYSCQNQTKGLLYQLFRNLFCSYGLTEAHGKWRCADASITNDKGHDGHRTPTWWLTGSNLTLSVNNSGLFFLCGNGVYKGFPPKWSGRCGLGYLVPSLTRYLTLNASQITNLRSFIHKVTPHRCTQGDTDNPPLYCNPKDNSTIRALFPSLGTYDLEKAILNI

SEQ ID NO: 702 - protein, 368 aa, Homo sapiens
QHLLAPVFRTLSILTNQSNCWLCEHLDNAEQPELVFVPASASTWWTYSGQWMYERVWYPQAEVQNHSTSSYRKVTWHWEASMEAQGLSFAQVRLLEGNFSLCVENKNGSGPFLGNIPKQYCNQILWFDSTDGTFMPSIDVTNESRNDDDDTSVCLGTRQCSWFAGCTNRTWNSSAVPLIGLPNTQDYKWVDRNSGLTWSGNDTCLYSCQNQTKGLLYQLFRNLFCSYGLTEAHGKWRCADASITNDKGHDGHRTPTWWLTGSNLTLSVNNSGLFFLCGNGVYKGFPPKWSGRCGLGYLVPSLTRYLTLNASQITNLRSFIHKVTPHRCTQGDTDNPPLYCNPKDNSTIRALFPSLGTYDLEKAILNIS

SEQ ID NO: 703 - protein, 369 aa, Homo sapiens
QHLLAPVFRTLSILTNQSNCWLCEHLDNAEQPELVFVPASASTWWTYSGQWMYERVWYPQAEVQNHSTSSYRKVTWHWEASMEAQGLSFAQVRLLEGNFSLCVENKNGSGPFLGNIPKQYCNQILWFDSTDGTFMPSIDVTNESRNDDDDTSVCLGTRQCSWFAGCTNRTWNSSAVPLIGLPNTQDYKWVDRNSGLTWSGNDTCLYSCQNQTKGLLYQLFRNLFCSYGLTEAHGKWRCADASITNDKGHDGHRTPTWWLTGSNLTLSVNNSGLFFLCGNGVYKGFPPKWSGRCGLGYLVPSLTRYLTLNASQITNLRSFIHKVTPHRCTQGDTDNPPLYCNPKDNSTIRALFPSLGTYDLEKAILNISK

SEQ ID NO: 704 - protein, 370 aa, Homo sapiens
QHLLAPVFRTLSILTNQSNCWLCEHLDNAEQPELVFVPASASTWWTYSGQWMYERVWYPQAEVQNHSTSSYRKVTWHWEASMEAQGLSFAQVRLLEGNFSLCVENKNGSGPFLGNIPKQYCNQILWFDSTDGTFMPSIDVTNESRNDDDDTSVCLGTRQCSWFAGCTNRTWNSSAVPLIGLPNTQDYKWVDRNSGLTWSGNDTCLYSCQNQTKGLLYQLFRNLFCSYGLTEAHGKWRCADASITNDKGHDGHRTPTWWLTGSNLTLSVNNSGLFFLCGNGVYKGFPPKWSGRCGLGYLVPSLTRYLTLNASQITNLRSFIHKVTPHRCTQGDTDNPPLYCNPKDNSTIRALFPSLGTYDLEKAILNISKA

SEQ ID NO: 705 - protein, 371 aa, Homo sapiens
QHLLAPVFRTLSILTNQSNCWLCEHLDNAEQPELVFVPASASTWWTYSGQWMYERVWYPQAEVQNHSTSSYRKVTWHWEASMEAQGLSFAQVRLLEGNFSLCVENKNGSGPFLGNIPKQYCNQILWFDSTDGTFMPSIDVTNESRNDDDDTSVCLGTRQCSWFAGCTNRTWNSSAVPLIGLPNTQDYKWVDRNSGLTWSGNDTCLYSCQNQTKGLLYQLFRNLFCSYGLTEAHGKWRCADASITNDKGHDGHRTPTWWLTGSNLTLSVNNSGLFFLCGNGVYKGFPPKWSGRCGLGYLVPSLTRYLTLNASQITNLRSFIHKVTPHRCTQGDTDNPPLYCNPKDNSTIRALFPSLGTYDLEKAILNISKAM

SEQ ID NO: 706 - protein, 372 aa, Homo sapiens
QHLLAPVFRTLSILTNQSNCWLCEHLDNAEQPELVFVPASASTWWTYSGQWMYERVWYPQAEVQNHSTSSYRKVTWHWEASMEAQGLSFAQVRLLEGNFSLCVENKNGSGPFLGNIPKQYCNQILWFDSTDGTFMPSIDVTNESRNDDDDTSVCLGTRQCSWFAGCTNRTWNSSAVPLIGLPNTQDYKWVDRNSGLTWSGNDTCLYSCQNQTKGLLYQLFRNLFCSYGLTEAHGKWRCADASITNDKGHDGHRTPTWWLTGSNLTLSVNNSGLFFLCGNGVYKGFPPKWSGRCGLGYLVPSLTRYLTLNASQITNLRSFIHKVTPHRCTQGDTDNPPLYCNPKDNSTIRALFPSLGTYDLEKAILNISKAME

SEQ ID NO: 707 - protein, 373 aa, Homo sapiens
QHLLAPVFRTLSILTNQSNCWLCEHLDNAEQPELVFVPASASTWWTYSGQWMYERVWYPQAEVQNHSTSSYRKVTWHWEASMEAQGLSFAQVRLLEGNFSLCVENKNGSGPFLGNIPKQYCNQILWFDSTDGTFMPSIDVTNESRNDDDDTSVCLGTRQCSWFAGCTNRTWNSSAVPLIGLPNTQDYKWVDRNSGLTWSGNDTCLYSCQNQTKGLLYQLFRNLFCSYGLTEAHGKWRCADASITNDKGHDGHRTPTWWLTGSNLTLSVNNSGLFFLCGNGVYKGFPPKWSGRCGLGYLVPSLTRYLTLNASQITNLRSFIHKVTPHRCTQGDTDNPPLYCNPKDNSTIRALFPSLGTYDLEKAILNISKAMEQ

SEQ ID NO: 708 - protein, 374 aa, Homo sapiens
QHLLAPVFRTLSILTNQSNCWLCEHLDNAEQPELVFVPASASTWWTYSGQWMYERVWYPQAEVQNHSTSSYRKVTWHWEASMEAQGLSFAQVRLLEGNFSLCVENKNGSGPFLGNIPKQYCNQILWFDSTDGTFMPSIDVTNESRNDDDDTSVCLGTRQCSWFAGCTNRTWNSSAVPLIGLPNTQDYKWVDRNSGLTWSGNDTCLYSCQNQTKGLLYQLFRNLFCSYGLTEAHGKWRCADASITNDKGHDGHRTPTWWLTGSNLTLSVNNSGLFFLCGNGVYKGFPPKWSGRCGLGYLVPSLTRYLTLNASQITNLRSFIHKVTPHRCTQGDTDNPPLYCNPKDNSTIRALFPSLGTYDLEKAILNISKAMEQE

SEQ ID NO: 709 - protein, 375 aa, Homo sapiens
QHLLAPVFRTLSILTNQSNCWLCEHLDNAEQPELVFVPASASTWWTYSGQWMYERVWYPQAEVQNHSTSSYRKVTWHWEASMEAQGLSFAQVRLLEGNFSLCVENKNGSGPFLGNIPKQYCNQILWFDSTDGTFMPSIDVTNESRNDDDDTSVCLGTRQCSWFAGCTNRTWNSSAVPLIGLPNTQDYKWVDRNSGLTWSGNDTCLYSCQNQTKGLLYQLFRNLFCSYGLTEAHGKWRCADASITNDKGHDGHRTPTWWLTGSNLTLSVNNSGLFFLCGNGVYKGFPPKWSGRCGLGYLVPSLTRYLTLNASQITNLRSFIHKVTPHRCTQGDTDNPPLYCNPKDNSTIRALFPSLGTYDLEKAILNISKAMEQEF

SEQ ID NO: 710 - protein, 355 aa, Homo sapiens
HLLAPVFRTLSILTNQSNCWLCEHLDNAEQPELVFVPASASTWWTYSGQWMYERVWYPQAEVQNHSTSSYRKVTWHWEASMEAQGLSFAQVRLLEGNFSLCVENKNGSGPFLGNIPKQYCNQILWFDSTDGTFMPSIDVTNESRNDDDDTSVCLGTRQCSWFAGCTNRTWNSSAVPLIGLPNTQDYKWVDRNSGLTWSGNDTCLYSCQNQTKGLLYQLFRNLFCSYGLTEAHGKWRCADASITNDKGHDGHRTPTWWLTGSNLTLSVNNSGLFFLCGNGVYKGFPPKWSGRCGLGYLVPSLTRYLTLNASQITNLRSFIHKVTPHRCTQGDTDNPPLYCNPKDNSTIRALFPSLG

SEQ ID NO: 711 - protein, 356 aa, Homo sapiens
HLLAPVFRTLSILTNQSNCWLCEHLDNAEQPELVFVPASASTWWTYSGQWMYERVWYPQAEVQNHSTSSYRKVTWHWEASMEAQGLSFAQVRLLEGNFSLCVENKNGSGPFLGNIPKQYCNQILWFDSTDGTFMPSIDVTNESRNDDDDTSVCLGTRQCSWFAGCTNRTWNSSAVPLIGLPNTQDYKWVDRNSGLTWSGNDTCLYSCQNQTKGLLYQLFRNLFCSYGLTEAHGKWRCADASITNDKGHDGHRTPTWWLTGSNLTLSVNNSGLFFLCGNGVYKGFPPKWSGRCGLGYLVPSLTRYLTLNASQITNLRSFIHKVTPHRCTQGDTDNPPLYCNPKDNSTIRALFPSLGT

SEQ ID NO: 712 - protein, 357 aa, Homo sapiens
HLLAPVFRTLSILTNQSNCWLCEHLDNAEQPELVFVPASASTWWTYSGQWMYERVWYPQAEVQNHSTSSYRKVTWHWEASMEAQGLSFAQVRLLEGNFSLCVENKNGSGPFLGNIPKQYCNQILWFDSTDGTFMPSIDVTNESRNDDDDTSVCLGTRQCSWFAGCTNRTWNSSAVPLIGLPNTQDYKWVDRNSGLTWSGNDTCLYSCQNQTKGLLYQLFRNLFCSYGLTEAHGKWRCADASITNDKGHDGHRTPTWWLTGSNLTLSVNNSGLFFLCGNGVYKGFPPKWSGRCGLGYLVPSLTRYLTLNASQITNLRSFIHKVTPHRCTQGDTDNPPLYCNPKDNSTIRALFPSLGTY

SEQ ID NO: 713 - protein, 358 aa, Homo sapiens
HLLAPVFRTLSILTNQSNCWLCEHLDNAEQPELVFVPASASTWWTYSGQWMYERVWYPQAEVQNHSTSSYRKVTWHWEASMEAQGLSFAQVRLLEGNFSLCVENKNGSGPFLGNIPKQYCNQILWFDSTDGTFMPSIDVTNESRNDDDDTSVCLGTRQCSWFAGCTNRTWNSSAVPLIGLPNTQDYKWVDRNSGLTWSGNDTCLYSCQNQTKGLLYQLFRNLFCSYGLTEAHGKWRCADASITNDKGHDGHRTPTWWLTGSNLTLSVNNSGLFFLCGNGVYKGFPPKWSGRCGLGYLVPSLTRYLTLNASQITNLRSFIHKVTPHRCTQGDTDNPPLYCNPKDNSTIRALFPSLGTYD

SEQ ID NO: 714 - protein, 359 aa, Homo sapiens
HLLAPVFRTLSILTNQSNCWLCEHLDNAEQPELVFVPASASTWWTYSGQWMYERVWYPQAEVQNHSTSSYRKVTWHWEASMEAQGLSFAQVRLLEGNFSLCVENKNGSGPFLGNIPKQYCNQILWFDSTDGTFMPSIDVTNESRNDDDDTSVCLGTRQCSWFAGCTNRTWNSSAVPLIGLPNTQDYKWVDRNSGLTWSGNDTCLYSCQNQTKGLLYQLFRNLFCSYGLTEAHGKWRCADASITNDKGHDGHRTPTWWLTGSNLTLSVNNSGLFFLCGNGVYKGFPPKWSGRCGLGYLVPSLTRYLTLNASQITNLRSFIHKVTPHRCTQGDTDNPPLYCNPKDNSTIRALFPSLGTYDL

SEQ ID NO: 715 - protein, 360 aa, Homo sapiens
HLLAPVFRTLSILTNQSNCWLCEHLDNAEQPELVFVPASASTWWTYSGQWMYERVWYPQAEVQNHSTSSYRKVTWHWEASMEAQGLSFAQVRLLEGNFSLCVENKNGSGPFLGNIPKQYCNQILWFDSTDGTFMPSIDVTNESRNDDDDTSVCLGTRQCSWFAGCTNRTWNSSAVPLIGLPNTQDYKWVDRNSGLTWSGNDTCLYSCQNQTKGLLYQLFRNLFCSYGLTEAHGKWRCADASITNDKGHDGHRTPTWWLTGSNLTLSVNNSGLFFLCGNGVYKGFPPKWSGRCGLGYLVPSLTRYLTLNASQITNLRSFIHKVTPHRCTQGDTDNPPLYCNPKDNSTIRALFPSLGTYDLE

SEQ ID NO: 716 - protein, 361 aa, Homo sapiens
HLLAPVFRTLSILTNQSNCWLCEHLDNAEQPELVFVPASASTWWTYSGQWMYERVWYPQAEVQNHSTSSYRKVTWHWEASMEAQGLSFAQVRLLEGNFSLCVENKNGSGPFLGNIPKQYCNQILWFDSTDGTFMPSIDVTNESRNDDDDTSVCLGTRQCSWFAGCTNRTWNSSAVPLIGLPNTQDYKWVDRNSGLTWSGNDTCLYSCQNQTKGLLYQLFRNLFCSYGLTEAHGKWRCADASITNDKGHDGHRTPTWWLTGSNLTLSVNNSGLFFLCGNGVYKGFPPKWSGRCGLGYLVPSLTRYLTLNASQITNLRSFIHKVTPHRCTQGDTDNPPLYCNPKDNSTIRALFPSLGTYDLEK

SEQ ID NO: 717 - protein, 362 aa, Homo sapiens
HLLAPVFRTLSILTNQSNCWLCEHLDNAEQPELVFVPASASTWWTYSGQWMYERVWYPQAEVQNHSTSSYRKVTWHWEASMEAQGLSFAQVRLLEGNFSLCVENKNGSGPFLGNIPKQYCNQILWFDSTDGTFMPSIDVTNESRNDDDDTSVCLGTRQCSWFAGCTNRTWNSSAVPLIGLPNTQDYKWVDRNSGLTWSGNDTCLYSCQNQTKGLLYQLFRNLFCSYGLTEAHGKWRCADASITNDKGHDGHRTPTWWLTGSNLTLSVNNSGLFFLCGNGVYKGFPPKWSGRCGLGYLVPSLTRYLTLNASQITNLRSFIHKVTPHRCTQGDTDNPPLYCNPKDNSTIRALFPSLGTYDLEKA

SEQ ID NO: 718 - protein, 363 aa, Homo sapiens
HLLAPVFRTLSILTNQSNCWLCEHLDNAEQPELVFVPASASTWWTYSGQWMYERVWYPQAEVQNHSTSSYRKVTWHWEASMEAQGLSFAQVRLLEGNFSLCVENKNGSGPFLGNIPKQYCNQILWFDSTDGTFMPSIDVTNESRNDDDDTSVCLGTRQCSWFAGCTNRTWNSSAVPLIGLPNTQDYKWVDRNSGLTWSGNDTCLYSCQNQTKGLLYQLFRNLFCSYGLTEAHGKWRCADASITNDKGHDGHRTPTWWLTGSNLTLSVNNSGLFFLCGNGVYKGFPPKWSGRCGLGYLVPSLTRYLTLNASQITNLRSFIHKVTPHRCTQGDTDNPPLYCNPKDNSTIRALFPSLGTYDLEKAI

SEQ ID NO: 719 - protein, 364 aa, Homo sapiens
HLLAPVFRTLSILTNQSNCWLCEHLDNAEQPELVFVPASASTWWTYSGQWMYERVWYPQAEVQNHSTSSYRKVTWHWEASMEAQGLSFAQVRLLEGNFSLCVENKNGSGPFLGNIPKQYCNQILWFDSTDGTFMPSIDVTNESRNDDDDTSVCLGTRQCSWFAGCTNRTWNSSAVPLIGLPNTQDYKWVDRNSGLTWSGNDTCLYSCQNQTKGLLYQLFRNLFCSYGLTEAHGKWRCADASITNDKGHDGHRTPTWWLTGSNLTLSVNNSGLFFLCGNGVYKGFPPKWSGRCGLGYLVPSLTRYLTLNASQITNLRSFIHKVTPHRCTQGDTDNPPLYCNPKDNSTIRALFPSLGTYDLEKAIL

SEQ ID NO: 720 - protein, 365 aa, Homo sapiens
HLLAPVFRTLSILTNQSNCWLCEHLDNAEQPELVFVPASASTWWTYSGQWMYERVWYPQAEVQNHSTSSYRKVTWHWEASMEAQGLSFAQVRLLEGNFSLCVENKNGSGPFLGNIPKQYCNQILWFDSTDGTFMPSIDVTNESRNDDDDTSVCLGTRQCSWFAGCTNRTWNSSAVPLIGLPNTQDYKWVDRNSGLTWSGNDTCLYSCQNQTKGLLYQLFRNLFCSYGLTEAHGKWRCADASITNDKGHDGHRTPTWWLTGSNLTLSVNNSGLFFLCGNGVYKGFPPKWSGRCGLGYLVPSLTRYLTLNASQITNLRSFIHKVTPHRCTQGDTDNPPLYCNPKDNSTIRALFPSLGTYDLEKAILN

SEQ ID NO: 721 - protein, 366 aa, Homo sapiens
HLLAPVFRTLSILTNQSNCWLCEHLDNAEQPELVFVPASASTWWTYSGQWMYERVWYPQAEVQNHSTSSYRKVTWHWEASMEAQGLSFAQVRLLEGNFSLCVENKNGSGPFLGNIPKQYCNQILWFDSTDGTFMPSIDVTNESRNDDDDTSVCLGTRQCSWFAGCTNRTWNSSAVPLIGLPNTQDYKWVDRNSGLTWSGNDTCLYSCQNQTKGLLYQLFRNLFCSYGLTEAHGKWRCADASITNDKGHDGHRTPTWWLTGSNLTLSVNNSGLFFLCGNGVYKGFPPKWSGRCGLGYLVPSLTRYLTLNASQITNLRSFIHKVTPHRCTQGDTDNPPLYCNPKDNSTIRALFPSLGTYDLEKAILNI

SEQ ID NO: 722 - protein, 367 aa, Homo sapiens
HLLAPVFRTLSILTNQSNCWLCEHLDNAEQPELVFVPASASTWWTYSGQWMYERVWYPQAEVQNHSTSSYRKVTWHWEASMEAQGLSFAQVRLLEGNFSLCVENKNGSGPFLGNIPKQYCNQILWFDSTDGTFMPSIDVTNESRNDDDDTSVCLGTRQCSWFAGCTNRTWNSSAVPLIGLPNTQDYKWVDRNSGLTWSGNDTCLYSCQNQTKGLLYQLFRNLFCSYGLTEAHGKWRCADASITNDKGHDGHRTPTWWLTGSNLTLSVNNSGLFFLCGNGVYKGFPPKWSGRCGLGYLVPSLTRYLTLNASQITNLRSFIHKVTPHRCTQGDTDNPPLYCNPKDNSTIRALFPSLGTYDLEKAILNIS

SEQ ID NO: 723 - protein, 368 aa, Homo sapiens
HLLAPVFRTLSILTNQSNCWLCEHLDNAEQPELVFVPASASTWWTYSGQWMYERVWYPQAEVQNHSTSSYRKVTWHWEASMEAQGLSFAQVRLLEGNFSLCVENKNGSGPFLGNIPKQYCNQILWFDSTDGTFMPSIDVTNESRNDDDDTSVCLGTRQCSWFAGCTNRTWNSSAVPLIGLPNTQDYKWVDRNSGLTWSGNDTCLYSCQNQTKGLLYQLFRNLFCSYGLTEAHGKWRCADASITNDKGHDGHRTPTWWLTGSNLTLSVNNSGLFFLCGNGVYKGFPPKWSGRCGLGYLVPSLTRYLTLNASQITNLRSFIHKVTPHRCTQGDTDNPPLYCNPKDNSTIRALFPSLGTYDLEKAILNISK

SEQ ID NO: 724 - protein, 369 aa, Homo sapiens
HLLAPVFRTLSILTNQSNCWLCEHLDNAEQPELVFVPASASTWWTYSGQWMYERVWYPQAEVQNHSTSSYRKVTWHWEASMEAQGLSFAQVRLLEGNFSLCVENKNGSGPFLGNIPKQYCNQILWFDSTDGTFMPSIDVTNESRNDDDDTSVCLGTRQCSWFAGCTNRTWNSSAVPLIGLPNTQDYKWVDRNSGLTWSGNDTCLYSCQNQTKGLLYQLFRNLFCSYGLTEAHGKWRCADASITNDKGHDGHRTPTWWLTGSNLTLSVNNSGLFFLCGNGVYKGFPPKWSGRCGLGYLVPSLTRYLTLNASQITNLRSFIHKVTPHRCTQGDTDNPPLYCNPKDNSTIRALFPSLGTYDLEKAILNISKA

SEQ ID NO: 725 - protein, 370 aa, Homo sapiens
HLLAPVFRTLSILTNQSNCWLCEHLDNAEQPELVFVPASASTWWTYSGQWMYERVWYPQAEVQNHSTSSYRKVTWHWEASMEAQGLSFAQVRLLEGNFSLCVENKNGSGPFLGNIPKQYCNQILWFDSTDGTFMPSIDVTNESRNDDDDTSVCLGTRQCSWFAGCTNRTWNSSAVPLIGLPNTQDYKWVDRNSGLTWSGNDTCLYSCQNQTKGLLYQLFRNLFCSYGLTEAHGKWRCADASITNDKGHDGHRTPTWWLTGSNLTLSVNNSGLFFLCGNGVYKGFPPKWSGRCGLGYLVPSLTRYLTLNASQITNLRSFIHKVTPHRCTQGDTDNPPLYCNPKDNSTIRALFPSLGTYDLEKAILNISKAM

SEQ ID NO: 726 - protein, 371 aa, Homo sapiens
HLLAPVFRTLSILTNQSNCWLCEHLDNAEQPELVFVPASASTWWTYSGQWMYERVWYPQAEVQNHSTSSYRKVTWHWEASMEAQGLSFAQVRLLEGNFSLCVENKNGSGPFLGNIPKQYCNQILWFDSTDGTFMPSIDVTNESRNDDDDTSVCLGTRQCSWFAGCTNRTWNSSAVPLIGLPNTQDYKWVDRNSGLTWSGNDTCLYSCQNQTKGLLYQLFRNLFCSYGLTEAHGKWRCADASITNDKGHDGHRTPTWWLTGSNLTLSVNNSGLFFLCGNGVYKGFPPKWSGRCGLGYLVPSLTRYLTLNASQITNLRSFIHKVTPHRCTQGDTDNPPLYCNPKDNSTIRALFPSLGTYDLEKAILNISKAME

SEQ ID NO: 727 - protein, 372 aa, Homo sapiens
HLLAPVFRTLSILTNQSNCWLCEHLDNAEQPELVFVPASASTWWTYSGQWMYERVWYPQAEVQNHSTSSYRKVTWHWEASMEAQGLSFAQVRLLEGNFSLCVENKNGSGPFLGNIPKQYCNQILWFDSTDGTFMPSIDVTNESRNDDDDTSVCLGTRQCSWFAGCTNRTWNSSAVPLIGLPNTQDYKWVDRNSGLTWSGNDTCLYSCQNQTKGLLYQLFRNLFCSYGLTEAHGKWRCADASITNDKGHDGHRTPTWWLTGSNLTLSVNNSGLFFLCGNGVYKGFPPKWSGRCGLGYLVPSLTRYLTLNASQITNLRSFIHKVTPHRCTQGDTDNPPLYCNPKDNSTIRALFPSLGTYDLEKAILNISKAMEQ

SEQ ID NO: 728 - protein, 373 aa, Homo sapiens
HLLAPVFRTLSILTNQSNCWLCEHLDNAEQPELVFVPASASTWWTYSGQWMYERVWYPQAEVQNHSTSSYRKVTWHWEASMEAQGLSFAQVRLLEGNFSLCVENKNGSGPFLGNIPKQYCNQILWFDSTDGTFMPSIDVTNESRNDDDDTSVCLGTRQCSWFAGCTNRTWNSSAVPLIGLPNTQDYKWVDRNSGLTWSGNDTCLYSCQNQTKGLLYQLFRNLFCSYGLTEAHGKWRCADASITNDKGHDGHRTPTWWLTGSNLTLSVNNSGLFFLCGNGVYKGFPPKWSGRCGLGYLVPSLTRYLTLNASQITNLRSFIHKVTPHRCTQGDTDNPPLYCNPKDNSTIRALFPSLGTYDLEKAILNISKAMEQE

SEQ ID NO: 729 - protein, 374 aa, Homo sapiens
HLLAPVFRTLSILTNQSNCWLCEHLDNAEQPELVFVPASASTWWTYSGQWMYERVWYPQAEVQNHSTSSYRKVTWHWEASMEAQGLSFAQVRLLEGNFSLCVENKNGSGPFLGNIPKQYCNQILWFDSTDGTFMPSIDVTNESRNDDDDTSVCLGTRQCSWFAGCTNRTWNSSAVPLIGLPNTQDYKWVDRNSGLTWSGNDTCLYSCQNQTKGLLYQLFRNLFCSYGLTEAHGKWRCADASITNDKGHDGHRTPTWWLTGSNLTLSVNNSGLFFLCGNGVYKGFPPKWSGRCGLGYLVPSLTRYLTLNASQITNLRSFIHKVTPHRCTQGDTDNPPLYCNPKDNSTIRALFPSLGTYDLEKAILNISKAMEQEF

SEQ ID NO: 730 - protein, 109 aa, Homo sapiens
TYDLEKAILNISKAMEQEFSATKQTLEAHQSKVSSLASASRKDHVLDIPTTQRQTACGTVGKQCCLYINYSEEIKSNIQRLHEASENLKNVPLLDWQGIFAKVGDWFRS

SEQ ID NO: 731 - protein, 108 aa, Homo sapiens
YDLEKAILNISKAMEQEFSATKQTLEAHQSKVSSLASASRKDHVLDIPTTQRQTACGTVGKQCCLYINYSEEIKSNIQRLHEASENLKNVPLLDWQGIFAKVGDWFRS

SEQ ID NO: 732 - protein, 107 aa, Homo sapiens
DLEKAILNISKAMEQEFSATKQTLEAHQSKVSSLASASRKDHVLDIPTTQRQTACGTVGKQCCLYINYSEEIKSNIQRLHEASENLKNVPLLDWQGIFAKVGDWFRS

SEQ ID NO: 733 - protein, 106 aa, Homo sapiens
LEKAILNISKAMEQEFSATKQTLEAHQSKVSSLASASRKDHVLDIPTTQRQTACGTVGKQCCLYINYSEEIKSNIQRLHEASENLKNVPLLDWQGIFAKVGDWFRS

SEQ ID NO: 734 - protein, 105 aa, Homo sapiens
EKAILNISKAMEQEFSATKQTLEAHQSKVSSLASASRKDHVLDIPTTQRQTACGTVGKQCCLYINYSEEIKSNIQRLHEASENLKNVPLLDWQGIFAKVGDWFRS

SEQ ID NO: 735 - protein, 104 aa, Homo sapiens
KAILNISKAMEQEFSATKQTLEAHQSKVSSLASASRKDHVLDIPTTQRQTACGTVGKQCCLYINYSEEIKSNIQRLHEASENLKNVPLLDWQGIFAKVGDWFRS

SEQ ID NO: 736 - protein, 103 aa, Homo sapiens
AILNISKAMEQEFSATKQTLEAHQSKVSSLASASRKDHVLDIPTTQRQTACGTVGKQCCLYINYSEEIKSNIQRLHEASENLKNVPLLDWQGIFAKVGDWFRS

SEQ ID NO: 737 - protein, 102 aa, Homo sapiens
ILNISKAMEQEFSATKQTLEAHQSKVSSLASASRKDHVLDIPTTQRQTACGTVGKQCCLYINYSEEIKSNIQRLHEASENLKNVPLLDWQGIFAKVGDWFRS

SEQ ID NO: 738 - protein, 101 aa, Homo sapiens
LNISKAMEQEFSATKQTLEAHQSKVSSLASASRKDHVLDIPTTQRQTACGTVGKQCCLYINYSEEIKSNIQRLHEASENLKNVPLLDWQGIFAKVGDWFRS

SEQ ID NO: 739 - protein, 100 aa, Homo sapiens
NISKAMEQEFSATKQTLEAHQSKVSSLASASRKDHVLDIPTTQRQTACGTVGKQCCLYINYSEEIKSNIQRLHEASENLKNVPLLDWQGIFAKVGDWFRS

SEQ ID NO: 740 - protein, 99 aa, Homo sapiens
ISKAMEQEFSATKQTLEAHQSKVSSLASASRKDHVLDIPTTQRQTACGTVGKQCCLYINYSEEIKSNIQRLHEASENLKNVPLLDWQGIFAKVGDWFRS

SEQ ID NO: 741 - protein, 98 aa, Homo sapiens
SKAMEQEFSATKQTLEAHQSKVSSLASASRKDHVLDIPTTQRQTACGTVGKQCCLYINYSEEIKSNIQRLHEASENLKNVPLLDWQGIFAKVGDWFRS

SEQ ID NO: 742 - protein, 97 aa, Homo sapiens
KAMEQEFSATKQTLEAHQSKVSSLASASRKDHVLDIPTTQRQTACGTVGKQCCLYINYSEEIKSNIQRLHEASENLKNVPLLDWQGIFAKVGDWFRS

SEQ ID NO: 743 - protein, 96 aa, Homo sapiens
AMEQEFSATKQTLEAHQSKVSSLASASRKDHVLDIPTTQRQTACGTVGKQCCLYINYSEEIKSNIQRLHEASENLKNVPLLDWQGIFAKVGDWFRS

SEQ ID NO: 744 - protein, 95 aa, Homo sapiens
MEQEFSATKQTLEAHQSKVSSLASASRKDHVLDIPTTQRQTACGTVGKQCCLYINYSEEIKSNIQRLHEASENLKNVPLLDWQGIFAKVGDWFRS

SEQ ID NO: 745 - protein, 94 aa, Homo sapiens
EQEFSATKQTLEAHQSKVSSLASASRKDHVLDIPTTQRQTACGTVGKQCCLYINYSEEIKSNIQRLHEASENLKNVPLLDWQGIFAKVGDWFRS

SEQ ID NO: 746 - protein, 93 aa, Homo sapiens
QEFSATKQTLEAHQSKVSSLASASRKDHVLDIPTTQRQTACGTVGKQCCLYINYSEEIKSNIQRLHEASENLKNVPLLDWQGIFAKVGDWFRS

SEQ ID NO: 747 - protein, 92 aa, Homo sapiens
EFSATKQTLEAHQSKVSSLASASRKDHVLDIPTTQRQTACGTVGKQCCLYINYSEEIKSNIQRLHEASENLKNVPLLDWQGIFAKVGDWFRS

SEQ ID NO: 748 - protein, 91 aa, Homo sapiens
FSATKQTLEAHQSKVSSLASASRKDHVLDIPTTQRQTACGTVGKQCCLYINYSEEIKSNIQRLHEASENLKNVPLLDWQGIFAKVGDWFRS

SEQ ID NO: 749 - protein, 90 aa, Homo sapiens
SATKQTLEAHQSKVSSLASASRKDHVLDIPTTQRQTACGTVGKQCCLYINYSEEIKSNIQRLHEASENLKNVPLLDWQGIFAKVGDWFRS

SEQ ID NO: 750 - protein, 108 aa, Homo sapiens
TYDLEKAILNISKAMEQEFSATKQTLEAHQSKVSSLASASRKDHVLDIPTTQRQTACGTVGKQCCLYINYSEEIKSNIQRLHEASENLKNVPLLDWQGIFAKVGDWFR

SEQ ID NO: 751 - protein, 107 aa, Homo sapiens
YDLEKAILNISKAMEQEFSATKQTLEAHQSKVSSLASASRKDHVLDIPTTQRQTACGTVGKQCCLYINYSEEIKSNIQRLHEASENLKNVPLLDWQGIFAKVGDWFR

SEQ ID NO: 752 - protein, 106 aa, Homo sapiens
DLEKAILNISKAMEQEFSATKQTLEAHQSKVSSLASASRKDHVLDIPTTQRQTACGTVGKQCCLYINYSEEIKSNIQRLHEASENLKNVPLLDWQGIFAKVGDWFR

SEQ ID NO: 753 - protein, 105 aa, Homo sapiens
LEKAILNISKAMEQEFSATKQTLEAHQSKVSSLASASRKDHVLDIPTTQRQTACGTVGKQCCLYINYSEEIKSNIQRLHEASENLKNVPLLDWQGIFAKVGDWFR

SEQ ID NO: 754 - protein, 104 aa, Homo sapiens
EKAILNISKAMEQEFSATKQTLEAHQSKVSSLASASRKDHVLDIPTTQRQTACGTVGKQCCLYINYSEEIKSNIQRLHEASENLKNVPLLDWQGIFAKVGDWFR

SEQ ID NO: 755 - protein, 103 aa, Homo sapiens
KAILNISKAMEQEFSATKQTLEAHQSKVSSLASASRKDHVLDIPTTQRQTACGTVGKQCCLYINYSEEIKSNIQRLHEASENLKNVPLLDWQGIFAKVGDWFR

SEQ ID NO: 756 - protein, 102 aa, Homo sapiens
AILNISKAMEQEFSATKQTLEAHQSKVSSLASASRKDHVLDIPTTQRQTACGTVGKQCCLYINYSEEIKSNIQRLHEASENLKNVPLLDWQGIFAKVGDWFR

SEQ ID NO: 757 - protein, 101 aa, Homo sapiens
ILNISKAMEQEFSATKQTLEAHQSKVSSLASASRKDHVLDIPTTQRQTACGTVGKQCCLYINYSEEIKSNIQRLHEASENLKNVPLLDWQGIFAKVGDWFR

SEQ ID NO: 758 - protein, 100 aa, Homo sapiens
LNISKAMEQEFSATKQTLEAHQSKVSSLASASRKDHVLDIPTTQRQTACGTVGKQCCLYINYSEEIKSNIQRLHEASENLKNVPLLDWQGIFAKVGDWFR

SEQ ID NO: 759 - protein, 99 aa, Homo sapiens
NISKAMEQEFSATKQTLEAHQSKVSSLASASRKDHVLDIPTTQRQTACGTVGKQCCLYINYSEEIKSNIQRLHEASENLKNVPLLDWQGIFAKVGDWFR

SEQ ID NO: 760 - protein, 98 aa, Homo sapiens
ISKAMEQEFSATKQTLEAHQSKVSSLASASRKDHVLDIPTTQRQTACGTVGKQCCLYINYSEEIKSNIQRLHEASENLKNVPLLDWQGIFAKVGDWFR

SEQ ID NO: 761 - protein, 97 aa, Homo sapiens
SKAMEQEFSATKQTLEAHQSKVSSLASASRKDHVLDIPTTQRQTACGTVGKQCCLYINYSEEIKSNIQRLHEASENLKNVPLLDWQGIFAKVGDWFR

SEQ ID NO: 762 - protein, 96 aa, Homo sapiens
KAMEQEFSATKQTLEAHQSKVSSLASASRKDHVLDIPTTQRQTACGTVGKQCCLYINYSEEIKSNIQRLHEASENLKNVPLLDWQGIFAKVGDWFR

SEQ ID NO: 763 - protein, 95 aa, Homo sapiens
AMEQEFSATKQTLEAHQSKVSSLASASRKDHVLDIPTTQRQTACGTVGKQCCLYINYSEEIKSNIQRLHEASENLKNVPLLDWQGIFAKVGDWFR

SEQ ID NO: 764 - protein, 94 aa, Homo sapiens
MEQEFSATKQTLEAHQSKVSSLASASRKDHVLDIPTTQRQTACGTVGKQCCLYINYSEEIKSNIQRLHEASENLKNVPLLDWQGIFAKVGDWFR

SEQ ID NO: 765 - protein, 93 aa, Homo sapiens
EQEFSATKQTLEAHQSKVSSLASASRKDHVLDIPTTQRQTACGTVGKQCCLYINYSEEIKSNIQRLHEASENLKNVPLLDWQGIFAKVGDWFR

SEQ ID NO: 766 - protein, 92 aa, Homo sapiens
QEFSATKQTLEAHQSKVSSLASASRKDHVLDIPTTQRQTACGTVGKQCCLYINYSEEIKSNIQRLHEASENLKNVPLLDWQGIFAKVGDWFR

SEQ ID NO: 767 - protein, 91 aa, Homo sapiens
EFSATKQTLEAHQSKVSSLASASRKDHVLDIPTTQRQTACGTVGKQCCLYINYSEEIKSNIQRLHEASENLKNVPLLDWQGIFAKVGDWFR

SEQ ID NO: 768 - protein, 90 aa, Homo sapiens
FSATKQTLEAHQSKVSSLASASRKDHVLDIPTTQRQTACGTVGKQCCLYINYSEEIKSNIQRLHEASENLKNVPLLDWQGIFAKVGDWFR

SEQ ID NO: 769 - protein, 89 aa, Homo sapiens
SATKQTLEAHQSKVSSLASASRKDHVLDIPTTQRQTACGTVGKQCCLYINYSEEIKSNIQRLHEASENLKNVPLLDWQGIFAKVGDWFR

SEQ ID NO: 770 - protein, 111 aa, Homo sapiens
TYDLEKAILNISKAMEQEFSATKQTLEAHQSKVSSLASASRKDHVLDIPTTQRQTACGTVGKQCCLYINYSEEIKSNIQRLHEASENLKNVPLLDWQGIFAKVGDWFRSWG

SEQ ID NO: 771 - protein, 110 aa, Homo sapiens
YDLEKAILNISKAMEQEFSATKQTLEAHQSKVSSLASASRKDHVLDIPTTQRQTACGTVGKQCCLYINYSEEIKSNIQRLHEASENLKNVPLLDWQGIFAKVGDWFRSWG

SEQ ID NO: 772 - protein, 109 aa, Homo sapiens
DLEKAILNISKAMEQEFSATKQTLEAHQSKVSSLASASRKDHVLDIPTTQRQTACGTVGKQCCLYINYSEEIKSNIQRLHEASENLKNVPLLDWQGIFAKVGDWFRSWG

SEQ ID NO: 773 - protein, 108 aa, Homo sapiens
LEKAILNISKAMEQEFSATKQTLEAHQSKVSSLASASRKDHVLDIPTTQRQTACGTVGKQCCLYINYSEEIKSNIQRLHEASENLKNVPLLDWQGIFAKVGDWFRSWG

SEQ ID NO: 774 - protein, 107 aa, Homo sapiens
EKAILNISKAMEQEFSATKQTLEAHQSKVSSLASASRKDHVLDIPTTQRQTACGTVGKQCCLYINYSEEIKSNIQRLHEASENLKNVPLLDWQGIFAKVGDWFRSWG

SEQ ID NO: 775 - protein, 106 aa, Homo sapiens
KAILNISKAMEQEFSATKQTLEAHQSKVSSLASASRKDHVLDIPTTQRQTACGTVGKQCCLYINYSEEIKSNIQRLHEASENLKNVPLLDWQGIFAKVGDWFRSWG

SEQ ID NO: 776 - protein, 105 aa, Homo sapiens
AILNISKAMEQEFSATKQTLEAHQSKVSSLASASRKDHVLDIPTTQRQTACGTVGKQCCLYINYSEEIKSNIQRLHEASENLKNVPLLDWQGIFAKVGDWFRSWG

SEQ ID NO: 777 - protein, 104 aa, Homo sapiens
ILNISKAMEQEFSATKQTLEAHQSKVSSLASASRKDHVLDIPTTQRQTACGTVGKQCCLYINYSEEIKSNIQRLHEASENLKNVPLLDWQGIFAKVGDWFRSWG

SEQ ID NO: 778 - protein, 103 aa, Homo sapiens
LNISKAMEQEFSATKQTLEAHQSKVSSLASASRKDHVLDIPTTQRQTACGTVGKQCCLYINYSEEIKSNIQRLHEASENLKNVPLLDWQGIFAKVGDWFRSWG

SEQ ID NO: 779 - protein, 102 aa, Homo sapiens
NISKAMEQEFSATKQTLEAHQSKVSSLASASRKDHVLDIPTTQRQTACGTVGKQCCLYINYSEEIKSNIQRLHEASENLKNVPLLDWQGIFAKVGDWFRSWG

SEQ ID NO: 780 - protein, 101 aa, Homo sapiens
ISKAMEQEFSATKQTLEAHQSKVSSLASASRKDHVLDIPTTQRQTACGTVGKQCCLYINYSEEIKSNIQRLHEASENLKNVPLLDWQGIFAKVGDWFRSWG

SEQ ID NO: 781 - protein, 100 aa, Homo sapiens
SKAMEQEFSATKQTLEAHQSKVSSLASASRKDHVLDIPTTQRQTACGTVGKQCCLYINYSEEIKSNIQRLHEASENLKNVPLLDWQGIFAKVGDWFRSWG

SEQ ID NO: 782 - protein, 99 aa, Homo sapiens
KAMEQEFSATKQTLEAHQSKVSSLASASRKDHVLDIPTTQRQTACGTVGKQCCLYINYSEEIKSNIQRLHEASENLKNVPLLDWQGIFAKVGDWFRSWG

SEQ ID NO: 783 - protein, 98 aa, Homo sapiens
AMEQEFSATKQTLEAHQSKVSSLASASRKDHVLDIPTTQRQTACGTVGKQCCLYINYSEEIKSNIQRLHEASENLKNVPLLDWQGIFAKVGDWFRSWG

SEQ ID NO: 784 - protein, 97 aa, Homo sapiens
MEQEFSATKQTLEAHQSKVSSLASASRKDHVLDIPTTQRQTACGTVGKQCCLYINYSEEIKSNIQRLHEASENLKNVPLLDWQGIFAKVGDWFRSWG

SEQ ID NO: 785 - protein, 96 aa, Homo sapiens
EQEFSATKQTLEAHQSKVSSLASASRKDHVLDIPTTQRQTACGTVGKQCCLYINYSEEIKSNIQRLHEASENLKNVPLLDWQGIFAKVGDWFRSWG

SEQ ID NO: 786 - protein, 95 aa, Homo sapiens
QEFSATKQTLEAHQSKVSSLASASRKDHVLDIPTTQRQTACGTVGKQCCLYINYSEEIKSNIQRLHEASENLKNVPLLDWQGIFAKVGDWFRSWG

SEQ ID NO: 787 - protein, 94 aa, Homo sapiens
EFSATKQTLEAHQSKVSSLASASRKDHVLDIPTTQRQTACGTVGKQCCLYINYSEEIKSNIQRLHEASENLKNVPLLDWQGIFAKVGDWFRSWG

SEQ ID NO: 788 - protein, 93 aa, Homo sapiens
FSATKQTLEAHQSKVSSLASASRKDHVLDIPTTQRQTACGTVGKQCCLYINYSEEIKSNIQRLHEASENLKNVPLLDWQGIFAKVGDWFRSWG

SEQ ID NO: 789 - protein, 92 aa, Homo sapiens
SATKQTLEAHQSKVSSLASASRKDHVLDIPTTQRQTACGTVGKQCCLYINYSEEIKSNIQRLHEASENLKNVPLLDWQGIFAKVGDWFRSWG

SEQ ID NO: 790 - protein, 106 aa, Homo sapiens
TYDLEKAILNISKAMEQEFSATKQTLEAHQSKVSSLASASRKDHVLDIPTTQRQTACGTVGKQCCLYINYSEEIKSNIQRLHEASENLKNVPLLDWQGIFAKVGDW

SEQ ID NO: 791 - protein, 105 aa, Homo sapiens
YDLEKAILNISKAMEQEFSATKQTLEAHQSKVSSLASASRKDHVLDIPTTQRQTACGTVGKQCCLYINYSEEIKSNIQRLHEASENLKNVPLLDWQGIFAKVGDW

SEQ ID NO: 792 - protein, 104 aa, Homo sapiens
DLEKAILNISKAMEQEFSATKQTLEAHQSKVSSLASASRKDHVLDIPTTQRQTACGTVGKQCCLYINYSEEIKSNIQRLHEASENLKNVPLLDWQGIFAKVGDW

SEQ ID NO: 793 - protein, 103 aa, Homo sapiens
LEKAILNISKAMEQEFSATKQTLEAHQSKVSSLASASRKDHVLDIPTTQRQTACGTVGKQCCLYINYSEEIKSNIQRLHEASENLKNVPLLDWQGIFAKVGDW

SEQ ID NO: 794 - protein, 102 aa, Homo sapiens
EKAILNISKAMEQEFSATKQTLEAHQSKVSSLASASRKDHVLDIPTTQRQTACGTVGKQCCLYINYSEEIKSNIQRLHEASENLKNVPLLDWQGIFAKVGDW

SEQ ID NO: 795 - protein, 101 aa, Homo sapiens
KAILNISKAMEQEFSATKQTLEAHQSKVSSLASASRKDHVLDIPTTQRQTACGTVGKQCCLYINYSEEIKSNIQRLHEASENLKNVPLLDWQGIFAKVGDW

SEQ ID NO: 796 - protein, 100 aa, Homo sapiens
AILNISKAMEQEFSATKQTLEAHQSKVSSLASASRKDHVLDIPTTQRQTACGTVGKQCCLYINYSEEIKSNIQRLHEASENLKNVPLLDWQGIFAKVGDW

SEQ ID NO: 797 - protein, 99 aa, Homo sapiens
ILNISKAMEQEFSATKQTLEAHQSKVSSLASASRKDHVLDIPTTQRQTACGTVGKQCCLYINYSEEIKSNIQRLHEASENLKNVPLLDWQGIFAKVGDW

SEQ ID NO: 798 - protein, 98 aa, Homo sapiens
LNISKAMEQEFSATKQTLEAHQSKVSSLASASRKDHVLDIPTTQRQTACGTVGKQCCLYINYSEEIKSNIQRLHEASENLKNVPLLDWQGIFAKVGDW

SEQ ID NO: 799 - protein, 97 aa, Homo sapiens
NISKAMEQEFSATKQTLEAHQSKVSSLASASRKDHVLDIPTTQRQTACGTVGKQCCLYINYSEEIKSNIQRLHEASENLKNVPLLDWQGIFAKVGDW

SEQ ID NO: 800 - protein, 96 aa, Homo sapiens
ISKAMEQEFSATKQTLEAHQSKVSSLASASRKDHVLDIPTTQRQTACGTVGKQCCLYINYSEEIKSNIQRLHEASENLKNVPLLDWQGIFAKVGDW

SEQ ID NO: 801 - protein, 95 aa, Homo sapiens
SKAMEQEFSATKQTLEAHQSKVSSLASASRKDHVLDIPTTQRQTACGTVGKQCCLYINYSEEIKSNIQRLHEASENLKNVPLLDWQGIFAKVGDW

SEQ ID NO: 802 - protein, 94 aa, Homo sapiens
KAMEQEFSATKQTLEAHQSKVSSLASASRKDHVLDIPTTQRQTACGTVGKQCCLYINYSEEIKSNIQRLHEASENLKNVPLLDWQGIFAKVGDW

SEQ ID NO: 803 - protein, 93 aa, Homo sapiens
AMEQEFSATKQTLEAHQSKVSSLASASRKDHVLDIPTTQRQTACGTVGKQCCLYINYSEEIKSNIQRLHEASENLKNVPLLDWQGIFAKVGDW

SEQ ID NO: 804 - protein, 92 aa, Homo sapiens
MEQEFSATKQTLEAHQSKVSSLASASRKDHVLDIPTTQRQTACGTVGKQCCLYINYSEEIKSNIQRLHEASENLKNVPLLDWQGIFAKVGDW

SEQ ID NO: 805 - protein, 91 aa, Homo sapiens
EQEFSATKQTLEAHQSKVSSLASASRKDHVLDIPTTQRQTACGTVGKQCCLYINYSEEIKSNIQRLHEASENLKNVPLLDWQGIFAKVGDW

SEQ ID NO: 806 - protein, 90 aa, Homo sapiens
QEFSATKQTLEAHQSKVSSLASASRKDHVLDIPTTQRQTACGTVGKQCCLYINYSEEIKSNIQRLHEASENLKNVPLLDWQGIFAKVGDW

SEQ ID NO: 807 - protein, 89 aa, Homo sapiens
EFSATKQTLEAHQSKVSSLASASRKDHVLDIPTTQRQTACGTVGKQCCLYINYSEEIKSNIQRLHEASENLKNVPLLDWQGIFAKVGDW

SEQ ID NO: 808 - protein, 88 aa, Homo sapiens
FSATKQTLEAHQSKVSSLASASRKDHVLDIPTTQRQTACGTVGKQCCLYINYSEEIKSNIQRLHEASENLKNVPLLDWQGIFAKVGDW

SEQ ID NO: 809 - protein, 87 aa, Homo sapiens
SATKQTLEAHQSKVSSLASASRKDHVLDIPTTQRQTACGTVGKQCCLYINYSEEIKSNIQRLHEASENLKNVPLLDWQGIFAKVGDW

SEQ ID NO: 810 - protein, 183 aa, Homo sapiens
TYDLEKAILNISKAMEQEFSATKQTLEAHQSKVSSLASASRKDHVLDIPTTQRQTACGTVGKQCCLYINYSEEIKSNIQRLHEASENLKNVPLLDWQGIFAKVGDWFRSWGYVLLIVLFCLFIFVLIYVRVFRKSRRSLNSQPLNLALSPQQSAQLLVSETSCQVSNRAMKGLTTHQYDTSLL

SEQ ID NO: 811 - protein, 182 aa, Homo sapiens
YDLEKAILNISKAMEQEFSATKQTLEAHQSKVSSLASASRKDHVLDIPTTQRQTACGTVGKQCCLYINYSEEIKSNIQRLHEASENLKNVPLLDWQGIFAKVGDWFRSWGYVLLIVLFCLFIFVLIYVRVFRKSRRSLNSQPLNLALSPQQSAQLLVSETSCQVSNRAMKGLTTHQYDTSLL

SEQ ID NO: 812 - protein, 181 aa, Homo sapiens
DLEKAILNISKAMEQEFSATKQTLEAHQSKVSSLASASRKDHVLDIPTTQRQTACGTVGKQCCLYINYSEEIKSNIQRLHEASENLKNVPLLDWQGIFAKVGDWFRSWGYVLLIVLFCLFIFVLIYVRVFRKSRRSLNSQPLNLALSPQQSAQLLVSETSCQVSNRAMKGLTTHQYDTSLL

SEQ ID NO: 813 - protein, 180 aa, Homo sapiens
LEKAILNISKAMEQEFSATKQTLEAHQSKVSSLASASRKDHVLDIPTTQRQTACGTVGKQCCLYINYSEEIKSNIQRLHEASENLKNVPLLDWQGIFAKVGDWFRSWGYVLLIVLFCLFIFVLIYVRVFRKSRRSLNSQPLNLALSPQQSAQLLVSETSCQVSNRAMKGLTTHQYDTSLL

SEQ ID NO: 814 - protein, 179 aa, Homo sapiens
EKAILNISKAMEQEFSATKQTLEAHQSKVSSLASASRKDHVLDIPTTQRQTACGTVGKQCCLYINYSEEIKSNIQRLHEASENLKNVPLLDWQGIFAKVGDWFRSWGYVLLIVLFCLFIFVLIYVRVFRKSRRSLNSQPLNLALSPQQSAQLLVSETSCQVSNRAMKGLTTHQYDTSLL

SEQ ID NO: 815 - protein, 178 aa, Homo sapiens
KAILNISKAMEQEFSATKQTLEAHQSKVSSLASASRKDHVLDIPTTQRQTACGTVGKQCCLYINYSEEIKSNIQRLHEASENLKNVPLLDWQGIFAKVGDWFRSWGYVLLIVLFCLFIFVLIYVRVFRKSRRSLNSQPLNLALSPQQSAQLLVSETSCQVSNRAMKGLTTHQYDTSLL

SEQ ID NO: 816 - protein, 177 aa, Homo sapiens
AILNISKAMEQEFSATKQTLEAHQSKVSSLASASRKDHVLDIPTTQRQTACGTVGKQCCLYINYSEEIKSNIQRLHEASENLKNVPLLDWQGIFAKVGDWFRSWGYVLLIVLFCLFIFVLIYVRVFRKSRRSLNSQPLNLALSPQQSAQLLVSETSCQVSNRAMKGLTTHQYDTSLL

SEQ ID NO: 817 - protein, 176 aa, Homo sapiens
ILNISKAMEQEFSATKQTLEAHQSKVSSLASASRKDHVLDIPTTQRQTACGTVGKQCCLYINYSEEIKSNIQRLHEASENLKNVPLLDWQGIFAKVGDWFRSWGYVLLIVLFCLFIFVLIYVRVFRKSRRSLNSQPLNLALSPQQSAQLLVSETSCQVSNRAMKGLTTHQYDTSLL

SEQ ID NO: 818 - protein, 175 aa, Homo sapiens
LNISKAMEQEFSATKQTLEAHQSKVSSLASASRKDHVLDIPTTQRQTACGTVGKQCCLYINYSEEIKSNIQRLHEASENLKNVPLLDWQGIFAKVGDWFRSWGYVLLIVLFCLFIFVLIYVRVFRKSRRSLNSQPLNLALSPQQSAQLLVSETSCQVSNRAMKGLTTHQYDTSLL

SEQ ID NO: 819 - protein, 174 aa, Homo sapiens
NISKAMEQEFSATKQTLEAHQSKVSSLASASRKDHVLDIPTTQRQTACGTVGKQCCLYINYSEEIKSNIQRLHEASENLKNVPLLDWQGIFAKVGDWFRSWGYVLLIVLFCLFIFVLIYVRVFRKSRRSLNSQPLNLALSPQQSAQLLVSETSCQVSNRAMKGLTTHQYDTSLL

SEQ ID NO: 820 - protein, 173 aa, Homo sapiens
ISKAMEQEFSATKQTLEAHQSKVSSLASASRKDHVLDIPTTQRQTACGTVGKQCCLYINYSEEIKSNIQRLHEASENLKNVPLLDWQGIFAKVGDWFRSWGYVLLIVLFCLFIFVLIYVRVFRKSRRSLNSQPLNLALSPQQSAQLLVSETSCQVSNRAMKGLTTHQYDTSLL

SEQ ID NO: 821 - protein, 172 aa, Homo sapiens
SKAMEQEFSATKQTLEAHQSKVSSLASASRKDHVLDIPTTQRQTACGTVGKQCCLYINYSEEIKSNIQRLHEASENLKNVPLLDWQGIFAKVGDWFRSWGYVLLIVLFCLFIFVLIYVRVFRKSRRSLNSQPLNLALSPQQSAQLLVSETSCQVSNRAMKGLTTHQYDTSLL

SEQ ID NO: 822 - protein, 171 aa, Homo sapiens
KAMEQEFSATKQTLEAHQSKVSSLASASRKDHVLDIPTTQRQTACGTVGKQCCLYINYSEEIKSNIQRLHEASENLKNVPLLDWQGIFAKVGDWFRSWGYVLLIVLFCLFIFVLIYVRVFRKSRRSLNSQPLNLALSPQQSAQLLVSETSCQVSNRAMKGLTTHQYDTSLL

SEQ ID NO: 823 - protein, 170 aa, Homo sapiens
AMEQEFSATKQTLEAHQSKVSSLASASRKDHVLDIPTTQRQTACGTVGKQCCLYINYSEEIKSNIQRLHEASENLKNVPLLDWQGIFAKVGDWFRSWGYVLLIVLFCLFIFVLIYVRVFRKSRRSLNSQPLNLALSPQQSAQLLVSETSCQVSNRAMKGLTTHQYDTSLL

SEQ ID NO: 824 - protein, 169 aa, Homo sapiens [sequence omitted]

SEQ ID NO: 825 - protein, 168 aa, Homo sapiens
EQEFSATKQTLEAHQSKVSSLASASRKDHVLDIPTTQRQTACGTVGKQCCLYINYSEEIKSNIQRLHEASENLKNVPLLDWQGIFAKVGDWFRSWGYVLLIVLFCLFIFVLIYVRVFRKSRRSLNSQPLNLALSPQQSAQLLVSETSCQVSNRAMKGLTTHQYDTSLL

SEQ ID NO: 826 - protein, 167 aa, Homo sapiens
QEFSATKQTLEAHQSKVSSLASASRKDHVLDIPTTQRQTACGTVGKQCCLYINYSEEIKSNIQRLHEASENLKNVPLLDWQGIFAKVGDWFRSWGYVLLIVLFCLFIFVLIYVRVFRKSRRSLNSQPLNLALSPQQSAQLLVSETSCQVSNRAMKGLTTHQYDTSLL

SEQ ID NO: 827 - protein, 166 aa, Homo sapiens
EFSATKQTLEAHQSKVSSLASASRKDHVLDIPTTQRQTACGTVGKQCCLYINYSEEIKSNIQRLHEASENLKNVPLLDWQGIFAKVGDWFRSWGYVLLIVLFCLFIFVLIYVRVFRKSRRSLNSQPLNLALSPQQSAQLLVSETSCQVSNRAMKGLTTHQYDTSLL

SEQ ID NO: 828 - protein, 165 aa, Homo sapiens
FSATKQTLEAHQSKVSSLASASRKDHVLDIPTTQRQTACGTVGKQCCLYINYSEEIKSNIQRLHEASENLKNVPLLDWQGIFAKVGDWFRSWGYVLLIVLFCLFIFVLIYVRVFRKSRRSLNSQPLNLALSPQQSAQLLVSETSCQVSNRAMKGLTTHQYDTSLL

SEQ ID NO: 829 - protein, 164 aa, Homo sapiens
SATKQTLEAHQSKVSSLASASRKDHVLDIPTTQRQTACGTVGKQCCLYINYSEEIKSNIQRLHEASENLKNVPLLDWQGIFAKVGDWFRSWGYVLLIVLFCLFIFVLIYVRVFRKSRRSLNSQPLNLALSPQQSAQLLVSETSCQVSNRAMKGLTTHQYDTSLL

SEQ ID NO: 830 - protein, 445 aa, Homo sapiens
LLAPVFRTLSILTNQSNCWLCEHLDNAEQPELVFVPASASTWWTYSGQWMYERVWYPQAEVQNHSTSSYRKVTWHWEASMEAQGLSFAQVRLLEGNFSLCVENKNGSGPFLGNIPKQYCNQILWFDSTDGTFMPSIDVTNESRNDDDDTSVCLGTRQCSWFAGCTNRTWNSSAVPLIGLPNTQDYKWVDRNSGLTWSGNDTCLYSCQNQTKGLLYQLFRNLFCSYGLTEAHGKWRCADASITNDKGHDGHRTPTWWLTGSNLTLSVNNSGLFFLCGNGVYKGFPPKWSGRCGLGYLVPSLTRYLTLNASQITNLRSFIHKVTPHRCTQGDTDNPPLYCNPKDNSTIRALFPSLGTYDLEKAILNISKAMEQEFSATKQTLEAHQSKVSSLASASRKDHVLDIPTTQRQTACGTVGKQCCLYINYSEEIKSNIQRLHEASENLKNV

SEQ ID NO: 831 - protein, 446 aa, Homo sapiens
LLAPVFRTLSILTNQSNCWLCEHLDNAEQPELVFVPASASTWWTYSGQWMYERVWYPQAEVQNHSTSSYRKVTWHWEASMEAQGLSFAQVRLLEGNFSLCVENKNGSGPFLGNIPKQYCNQILWFDSTDGTFMPSIDVTNESRNDDDDTSVCLGTRQCSWFAGCTNRTWNSSAVPLIGLPNTQDYKWVDRNSGLTWSGNDTCLYSCQNQTKGLLYQLFRNLFCSYGLTEAHGKWRCADASITNDKGHDGHRTPTWWLTGSNLTLSVNNSGLFFLCGNGVYKGFPPKWSGRCGLGYLVPSLTRYLTLNASQITNLRSFIHKVTPHRCTQGDTDNPPLYCNPKDNSTIRALFPSLGTYDLEKAILNISKAMEQEFSATKQTLEAHQSKVSSLASASRKDHVLDIPTTQRQTACGTVGKQCCLYINYSEEIKSNIQRLHEASENLKNVP

SEQ ID NO: 832 - protein, 447 aa, Homo sapiens
LLAPVFRTLSILTNQSNCWLCEHLDNAEQPELVFVPASASTWWTYSGQWMYERVWYPQAEVQNHSTSSYRKVTWHWEASMEAQGLSFAQVRLLEGNFSLCVENKNGSGPFLGNIPKQYCNQILWFDSTDGTFMPSIDVTNESRNDDDDTSVCLGTRQCSWFAGCTNRTWNSSAVPLIGLPNTQDYKWVDRNSGLTWSGNDTCLYSCQNQTKGLLYQLFRNLFCSYGLTEAHGKWRCADASITNDKGHDGHRTPTWWLTGSNLTLSVNNSGLFFLCGNGVYKGFPPKWSGRCGLGYLVPSLTRYLTLNASQITNLRSFIHKVTPHRCTQGDTDNPPLYCNPKDNSTIRALFPSLGTYDLEKAILNISKAMEQEFSATKQTLEAHQSKVSSLASASRKDHVLDIPTTQRQTACGTVGKQCCLYINYSEEIKSNIQRLHEASENLKNVPL

SEQ ID NO: 833 - protein, 448 aa, Homo sapiens
LLAPVFRTLSILTNQSNCWLCEHLDNAEQPELVFVPASASTWWTYSGQWMYERVWYPQAEVQNHSTSSYRKVTWHWEASMEAQGLSFAQVRLLEGNFSLCVENKNGSGPFLGNIPKQYCNQILWFDSTDGTFMPSIDVTNESRNDDDDTSVCLGTRQCSWFAGCTNRTWNSSAVPLIGLPNTQDYKWVDRNSGLTWSGNDTCLYSCQNQTKGLLYQLFRNLFCSYGLTEAHGKWRCADASITNDKGHDGHRTPTWWLTGSNLTLSVNNSGLFFLCGNGVYKGFPPKWSGRCGLGYLVPSLTRYLTLNASQITNLRSFIHKVTPHRCTQGDTDNPPLYCNPKDNSTIRALFPSLGTYDLEKAILNISKAMEQEFSATKQTLEAHQSKVSSLASASRKDHVLDIPTTQRQTACGTVGKQCCLYINYSEEIKSNIQRLHEASENLKNVPLL

SEQ ID NO: 834 - protein, 449 aa, Homo sapiens
LLAPVFRTLSILTNQSNCWLCEHLDNAEQPELVFVPASASTWWTYSGQWMYERVWYPQAEVQNHSTSSYRKVTWHWEASMEAQGLSFAQVRLLEGNFSLCVENKNGSGPFLGNIPKQYCNQILWFDSTDGTFMPSIDVTNESRNDDDDTSVCLGTRQCSWFAGCTNRTWNSSAVPLIGLPNTQDYKWVDRNSGLTWSGNDTCLYSCQNQTKGLLYQLFRNLFCSYGLTEAHGKWRCADASITNDKGHDGHRTPTWWLTGSNLTLSVNNSGLFFLCGNGVYKGFPPKWSGRCGLGYLVPSLTRYLTLNASQITNLRSFIHKVTPHRCTQGDTDNPPLYCNPKDNSTIRALFPSLGTYDLEKAILNISKAMEQEFSATKQTLEAHQSKVSSLASASRKDHVLDIPTTQRQTACGTVGKQCCLYINYSEEIKSNIQRLHEASENLKNVPLLD

SEQ ID NO: 835 - protein, 450 aa, Homo sapiens
LLAPVFRTLSILTNQSNCWLCEHLDNAEQPELVFVPASASTWWTYSGQWMYERVWYPQAEVQNHSTSSYRKVTWHWEASMEAQGLSFAQVRLLEGNFSLCVENKNGSGPFLGNIPKQYCNQILWFDSTDGTFMPSIDVTNESRNDDDDTSVCLGTRQCSWFAGCTNRTWNSSAVPLIGLPNTQDYKWVDRNSGLTWSGNDTCLYSCQNQTKGLLYQLFRNLFCSYGLTEAHGKWRCADASITNDKGHDGHRTPTWWLTGSNLTLSVNNSGLFFLCGNGVYKGFPPKWSGRCGLGYLVPSLTRYLTLNASQITNLRSFIHKVTPHRCTQGDTDNPPLYCNPKDNSTIRALFPSLGTYDLEKAILNISKAMEQEFSATKQTLEAHQSKVSSLASASRKDHVLDIPTTQRQTACGTVGKQCCLYINYSEEIKSNIQRLHEASENLKNVPLLDW

SEQ ID NO: 836 - protein, 451 aa, Homo sapiens
LLAPVFRTLSILTNQSNCWLCEHLDNAEQPELVFVPASASTWWTYSGQWMYERVWYPQAEVQNHSTSSYRKVTWHWEASMEAQGLSFAQVRLLEGNFSLCVENKNGSGPFLGNIPKQYCNQILWFDSTDGTFMPSIDVTNESRNDDDDTSVCLGTRQCSWFAGCTNRTWNSSAVPLIGLPNTQDYKWVDRNSGLTWSGNDTCLYSCQNQTKGLLYQLFRNLFCSYGLTEAHGKWRCADASITNDKGHDGHRTPTWWLTGSNLTLSVNNSGLFFLCGNGVYKGFPPKWSGRCGLGYLVPSLTRYLTLNASQITNLRSFIHKVTPHRCTQGDTDNPPLYCNPKDNSTIRALFPSLGTYDLEKAILNISKAMEQEFSATKQTLEAHQSKVSSLASASRKDHVLDIPTTQRQTACGTVGKQCCLYINYSEEIKSNIQRLHEASENLKNVPLLDWQ

SEQ ID NO: 837 - protein, 452 aa, Homo sapiens
LLAPVFRTLSILTNQSNCWLCEHLDNAEQPELVFVPASASTWWTYSGQWMYERVWYPQAEVQNHSTSSYRKVTWHWEASMEAQGLSFAQVRLLEGNFSLCVENKNGSGPFLGNIPKQYCNQILWFDSTDGTFMPSIDVTNESRNDDDDTSVCLGTRQCSWFAGCTNRTWNSSAVPLIGLPNTQDYKWVDRNSGLTWSGNDTCLYSCQNQTKGLLYQLFRNLFCSYGLTEAHGKWRCADASITNDKGHDGHRTPTWWLTGSNLTLSVNNSGLFFLCGNGVYKGFPPKWSGRCGLGYLVPSLTRYLTLNASQITNLRSFIHKVTPHRCTQGDTDNPPLYCNPKDNSTIRALFPSLGTYDLEKAILNISKAMEQEFSATKQTLEAHQSKVSSLASASRKDHVLDIPTTQRQTACGTVGKQCCLYINYSEEIKSNIQRLHEASENLKNVPLLDWQG

SEQ ID NO: 838 - protein, 453 aa, Homo sapiens
LLAPVFRTLSILTNQSNCWLCEHLDNAEQPELVFVPASASTWWTYSGQWMYERVWYPQAEVQNHSTSSYRKVTWHWEASMEAQGLSFAQVRLLEGNFSLCVENKNGSGPFLGNIPKQYCNQILWFDSTDGTFMPSIDVTNESRNDDDDTSVCLGTRQCSWFAGCTNRTWNSSAVPLIGLPNTQDYKWVDRNSGLTWSGNDTCLYSCQNQTKGLLYQLFRNLFCSYGLTEAHGKWRCADASITNDKGHDGHRTPTWWLTGSNLTLSVNNSGLFFLCGNGVYKGFPPKWSGRCGLGYLVPSLTRYLTLNASQITNLRSFIHKVTPHRCTQGDTDNPPLYCNPKDNSTIRALFPSLGTYDLEKAILNISKAMEQEFSATKQTLEAHQSKVSSLASASRKDHVLDIPTTQRQTACGTVGKQCCLYINYSEEIKSNIQRLHEASENLKNVPLLDWQGI

SEQ ID NO: 839 - protein, 454 aa, Homo sapiens
LLAPVFRTLSILTNQSNCWLCEHLDNAEQPELVFVPASASTWWTYSGQWMYERVWYPQAEVQNHSTSSYRKVTWHWEASMEAQGLSFAQVRLLEGNFSLCVENKNGSGPFLGNIPKQYCNQILWFDSTDGTFMPSIDVTNESRNDDDDTSVCLGTRQCSWFAGCTNRTWNSSAVPLIGLPNTQDYKWVDRNSGLTWSGNDTCLYSCQNQTKGLLYQLFRNLFCSYGLTEAHGKWRCADASITNDKGHDGHRTPTWWLTGSNLTLSVNNSGLFFLCGNGVYKGFPPKWSGRCGLGYLVPSLTRYLTLNASQITNLRSFIHKVTPHRCTQGDTDNPPLYCNPKDNSTIRALFPSLGTYDLEKAILNISKAMEQEFSATKQTLEAHQSKVSSLASASRKDHVLDIPTTQRQTACGTVGKQCCLYINYSEEIKSNIQRLHEASENLKNVPLLDWQGIF

SEQ ID NO: 840 - protein, 447 aa, Homo sapiens
QHLLAPVFRTLSILTNQSNCWLCEHLDNAEQPELVFVPASASTWWTYSGQWMYERVWYPQAEVQNHSTSSYRKVTWHWEASMEAQGLSFAQVRLLEGNFSLCVENKNGSGPFLGNIPKQYCNQILWFDSTDGTFMPSIDVTNESRNDDDDTSVCLGTRQCSWFAGCTNRTWNSSAVPLIGLPNTQDYKWVDRNSGLTWSGNDTCLYSCQNQTKGLLYQLFRNLFCSYGLTEAHGKWRCADASITNDKGHDGHRTPTWWLTGSNLTLSVNNSGLFFLCGNGVYKGFPPKWSGRCGLGYLVPSLTRYLTLNASQITNLRSFIHKVTPHRCTQGDTDNPPLYCNPKDNSTIRALFPSLGTYDLEKAILNISKAMEQEFSATKQTLEAHQSKVSSLASASRKDHVLDIPTTQRQTACGTVGKQCCLYINYSEEIKSNIQRLHEASENLKNV

SEQ ID NO: 841 - protein, 448 aa, Homo sapiens
QHLLAPVFRTLSILTNQSNCWLCEHLDNAEQPELVFVPASASTWWTYSGQWMYERVWYPQAEVQNHSTSSYRKVTWHWEASMEAQGLSFAQVRLLEGNFSLCVENKNGSGPFLGNIPKQYCNQILWFDSTDGTFMPSIDVTNESRNDDDDTSVCLGTRQCSWFAGCTNRTWNSSAVPLIGLPNTQDYKWVDRNSGLTWSGNDTCLYSCQNQTKGLLYQLFRNLFCSYGLTEAHGKWRCADASITNDKGHDGHRTPTWWLTGSNLTLSVNNSGLFFLCGNGVYKGFPPKWSGRCGLGYLVPSLTRYLTLNASQITNLRSFIHKVTPHRCTQGDTDNPPLYCNPKDNSTIRALFPSLGTYDLEKAILNISKAMEQEFSATKQTLEAHQSKVSSLASASRKDHVLDIPTTQRQTACGTVGKQCCLYINYSEEIKSNIQRLHEASENLKNVP

SEQ ID NO: 842 - protein, 449 aa, Homo sapiens
QHLLAPVFRTLSILTNQSNCWLCEHLDNAEQPELVFVPASASTWWTYSGQWMYERVWYPQAEVQNHSTSSYRKVTWHWEASMEAQGLSFAQVRLLEGNFSLCVENKNGSGPFLGNIPKQYCNQILWFDSTDGTFMPSIDVTNESRNDDDDTSVCLGTRQCSWFAGCTNRTWNSSAVPLIGLPNTQDYKWVDRNSGLTWSGNDTCLYSCQNQTKGLLYQLFRNLFCSYGLTEAHGKWRCADASITNDKGHDGHRTPTWWLTGSNLTLSVNNSGLFFLCGNGVYKGFPPKWSGRCGLGYLVPSLTRYLTLNASQITNLRSFIHKVTPHRCTQGDTDNPPLYCNPKDNSTIRALFPSLGTYDLEKAILNISKAMEQEFSATKQTLEAHQSKVSSLASASRKDHVLDIPTTQRQTACGTVGKQCCLYINYSEEIKSNIQRLHEASENLKNVPL

SEQ ID NO: 843 - protein, 450 aa, Homo sapiens
QHLLAPVFRTLSILTNQSNCWLCEHLDNAEQPELVFVPASASTWWTYSGQWMYERVWYPQAEVQNHSTSSYRKVTWHWEASMEAQGLSFAQVRLLEGNFSLCVENKNGSGPFLGNIPKQYCNQILWFDSTDGTFMPSIDVTNESRNDDDDTSVCLGTRQCSWFAGCTNRTWNSSAVPLIGLPNTQDYKWVDRNSGLTWSGNDTCLYSCQNQTKGLLYQLFRNLFCSYGLTEAHGKWRCADASITNDKGHDGHRTPTWWLTGSNLTLSVNNSGLFFLCGNGVYKGFPPKWSGRCGLGYLVPSLTRYLTLNASQITNLRSFIHKVTPHRCTQGDTDNPPLYCNPKDNSTIRALFPSLGTYDLEKAILNISKAMEQEFSATKQTLEAHQSKVSSLASASRKDHVLDIPTTQRQTACGTVGKQCCLYINYSEEIKSNIQRLHEASENLKNVPLL

SEQ ID NO: 844 - protein, 451 aa, Homo sapiens
QHLLAPVFRTLSILTNQSNCWLCEHLDNAEQPELVFVPASASTWWTYSGQWMYERVWYPQAEVQNHSTSSYRKVTWHWEASMEAQGLSFAQVRLLEGNFSLCVENKNGSGPFLGNIPKQYCNQILWFDSTDGTFMPSIDVTNESRNDDDDTSVCLGTRQCSWFAGCTNRTWNSSAVPLIGLPNTQDYKWVDRNSGLTWSGNDTCLYSCQNQTKGLLYQLFRNLFCSYGLTEAHGKWRCADASITNDKGHDGHRTPTWWLTGSNLTLSVNNSGLFFLCGNGVYKGFPPKWSGRCGLGYLVPSLTRYLTLNASQITNLRSFIHKVTPHRCTQGDTDNPPLYCNPKDNSTIRALFPSLGTYDLEKAILNISKAMEQEFSATKQTLEAHQSKVSSLASASRKDHVLDIPTTQRQTACGTVGKQCCLYINYSEEIKSNIQRLHEASENLKNVPLLD

SEQ ID NO: 845 - protein, 452 aa, Homo sapiens
QHLLAPVFRTLSILTNQSNCWLCEHLDNAEQPELVFVPASASTWWTYSGQWMYERVWYPQAEVQNHSTSSYRKVTWHWEASMEAQGLSFAQVRLLEGNFSLCVENKNGSGPFLGNIPKQYCNQILWFDSTDGTFMPSIDVTNESRNDDDDTSVCLGTRQCSWFAGCTNRTWNSSAVPLIGLPNTQDYKWVDRNSGLTWSGNDTCLYSCQNQTKGLLYQLFRNLFCSYGLTEAHGKWRCADASITNDKGHDGHRTPTWWLTGSNLTLSVNNSGLFFLCGNGVYKGFPPKWSGRCGLGYLVPSLTRYLTLNASQITNLRSFIHKVTPHRCTQGDTDNPPLYCNPKDNSTIRALFPSLGTYDLEKAILNISKAMEQEFSATKQTLEAHQSKVSSLASASRKDHVLDIPTTQRQTACGTVGKQCCLYINYSEEIKSNIQRLHEASENLKNVPLLDW

SEQ ID NO: 846 - protein, 453 aa, Homo sapiens
QHLLAPVFRTLSILTNQSNCWLCEHLDNAEQPELVFVPASASTWWTYSGQWMYERVWYPQAEVQNHSTSSYRKVTWHWEASMEAQGLSFAQVRLLEGNFSLCVENKNGSGPFLGNIPKQYCNQILWFDSTDGTFMPSIDVTNESRNDDDDTSVCLGTRQCSWFAGCTNRTWNSSAVPLIGLPNTQDYKWVDRNSGLTWSGNDTCLYSCQNQTKGLLYQLFRNLFCSYGLTEAHGKWRCADASITNDKGHDGHRTPTWWLTGSNLTLSVNNSGLFFLCGNGVYKGFPPKWSGRCGLGYLVPSLTRYLTLNASQITNLRSFIHKVTPHRCTQGDTDNPPLYCNPKDNSTIRALFPSLGTYDLEKAILNISKAMEQEFSATKQTLEAHQSKVSSLASASRKDHVLDIPTTQRQTACGTVGKQCCLYINYSEEIKSNIQRLHEASENLKNVPLLDWQ

SEQ ID NO: 847 - protein, 454 aa, Homo sapiens
QHLLAPVFRTLSILTNQSNCWLCEHLDNAEQPELVFVPASASTWWTYSGQWMYERVWYPQAEVQNHSTSSYRKVTWHWEASMEAQGLSFAQVRLLEGNFSLCVENKNGSGPFLGNIPKQYCNQILWFDSTDGTFMPSIDVTNESRNDDDDTSVCLGTRQCSWFAGCTNRTWNSSAVPLIGLPNTQDYKWVDRNSGLTWSGNDTCLYSCQNQTKGLLYQLFRNLFCSYGLTEAHGKWRCADASITNDKGHDGHRTPTWWLTGSNLTLSVNNSGLFFLCGNGVYKGFPPKWSGRCGLGYLVPSLTRYLTLNASQITNLRSFIHKVTPHRCTQGDTDNPPLYCNPKDNSTIRALFPSLGTYDLEKAILNISKAMEQEFSATKQTLEAHQSKVSSLASASRKDHVLDIPTTQRQTACGTVGKQCCLYINYSEEIKSNIQRLHEASENLKNVPLLDWQG

SEQ ID NO: 848 - protein, 455 aa, Homo sapiens
QHLLAPVFRTLSILTNQSNCWLCEHLDNAEQPELVFVPASASTWWTYSGQWMYERVWYPQAEVQNHSTSSYRKVTWHWEASMEAQGLSFAQVRLLEGNFSLCVENKNGSGPFLGNIPKQYCNQILWFDSTDGTFMPSIDVTNESRNDDDDTSVCLGTRQCSWFAGCTNRTWNSSAVPLIGLPNTQDYKWVDRNSGLTWSGNDTCLYSCQNQTKGLLYQLFRNLFCSYGLTEAHGKWRCADASITNDKGHDGHRTPTWWLTGSNLTLSVNNSGLFFLCGNGVYKGFPPKWSGRCGLGYLVPSLTRYLTLNASQITNLRSFIHKVTPHRCTQGDTDNPPLYCNPKDNSTIRALFPSLGTYDLEKAILNISKAMEQEFSATKQTLEAHQSKVSSLASASRKDHVLDIPTTQRQTACGTVGKQCCLYINYSEEIKSNIQRLHEASENLKNVPLLDWQGI

SEQ ID NO: 849 - protein, 456 aa, Homo sapiens
QHLLAPVFRTLSILTNQSNCWLCEHLDNAEQPELVFVPASASTWWTYSGQWMYERVWYPQAEVQNHSTSSYRKVTWHWEASMEAQGLSFAQVRLLEGNFSLCVENKNGSGPFLGNIPKQYCNQILWFDSTDGTFMPSIDVTNESRNDDDDTSVCLGTRQCSWFAGCTNRTWNSSAVPLIGLPNTQDYKWVDRNSGLTWSGNDTCLYSCQNQTKGLLYQLFRNLFCSYGLTEAHGKWRCADASITNDKGHDGHRTPTWWLTGSNLTLSVNNSGLFFLCGNGVYKGFPPKWSGRCGLGYLVPSLTRYLTLNASQITNLRSFIHKVTPHRCTQGDTDNPPLYCNPKDNSTIRALFPSLGTYDLEKAILNISKAMEQEFSATKQTLEAHQSKVSSLASASRKDHVLDIPTTQRQTACGTVGKQCCLYINYSEEIKSNIQRLHEASENLKNVPLLDWQGIF

SEQ ID NO: 850 - protein, 446 aa, Homo sapiens
HLLAPVFRTLSILTNQSNCWLCEHLDNAEQPELVFVPASASTWWTYSGQWMYERVWYPQAEVQNHSTSSYRKVTWHWEASMEAQGLSFAQVRLLEGNFSLCVENKNGSGPFLGNIPKQYCNQILWFDSTDGTFMPSIDVTNESRNDDDDTSVCLGTRQCSWFAGCTNRTWNSSAVPLIGLPNTQDYKWVDRNSGLTWSGNDTCLYSCQNQTKGLLYQLFRNLFCSYGLTEAHGKWRCADASITNDKGHDGHRTPTWWLTGSNLTLSVNNSGLFFLCGNGVYKGFPPKWSGRCGLGYLVPSLTRYLTLNASQITNLRSFIHKVTPHRCTQGDTDNPPLYCNPKDNSTIRALFPSLGTYDLEKAILNISKAMEQEFSATKQTLEAHQSKVSSLASASRKDHVLDIPTTQRQTACGTVGKQCCLYINYSEEIKSNIQRLHEASENLKNV

SEQ ID NO: 851 - protein, 447 aa, Homo sapiens
HLLAPVFRTLSILTNQSNCWLCEHLDNAEQPELVFVPASASTWWTYSGQWMYERVWYPQAEVQNHSTSSYRKVTWHWEASMEAQGLSFAQVRLLEGNFSLCVENKNGSGPFLGNIPKQYCNQILWFDSTDGTFMPSIDVTNESRNDDDDTSVCLGTRQCSWFAGCTNRTWNSSAVPLIGLPNTQDYKWVDRNSGLTWSGNDTCLYSCQNQTKGLLYQLFRNLFCSYGLTEAHGKWRCADASITNDKGHDGHRTPTWWLTGSNLTLSVNNSGLFFLCGNGVYKGFPPKWSGRCGLGYLVPSLTRYLTLNASQITNLRSFIHKVTPHRCTQGDTDNPPLYCNPKDNSTIRALFPSLGTYDLEKAILNISKAMEQEFSATKQTLEAHQSKVSSLASASRKDHVLDIPTTQRQTACGTVGKQCCLYINYSEEIKSNIQRLHEASENLKNVP

SEQ ID NO: 852 - protein, 448 aa, Homo sapiens
HLLAPVFRTLSILTNQSNCWLCEHLDNAEQPELVFVPASASTWWTYSGQWMYERVWYPQAEVQNHSTSSYRKVTWHWEASMEAQGLSFAQVRLLEGNFSLCVENKNGSGPFLGNIPKQYCNQILWFDSTDGTFMPSIDVTNESRNDDDDTSVCLGTRQCSWFAGCTNRTWNSSAVPLIGLPNTQDYKWVDRNSGLTWSGNDTCLYSCQNQTKGLLYQLFRNLFCSYGLTEAHGKWRCADASITNDKGHDGHRTPTWWLTGSNLTLSVNNSGLFFLCGNGVYKGFPPKWSGRCGLGYLVPSLTRYLTLNASQITNLRSFIHKVTPHRCTQGDTDNPPLYCNPKDNSTIRALFPSLGTYDLEKAILNISKAMEQEFSATKQTLEAHQSKVSSLASASRKDHVLDIPTTQRQTACGTVGKQCCLYINYSEEIKSNIQRLHEASENLKNVPL

SEQ ID NO: 853 - protein, 449 aa, Homo sapiens
HLLAPVFRTLSILTNQSNCWLCEHLDNAEQPELVFVPASASTWWTYSGQWMYERVWYPQAEVQNHSTSSYRKVTWHWEASMEAQGLSFAQVRLLEGNFSLCVENKNGSGPFLGNIPKQYCNQILWFDSTDGTFMPSIDVTNESRNDDDDTSVCLGTRQCSWFAGCTNRTWNSSAVPLIGLPNTQDYKWVDRNSGLTWSGNDTCLYSCQNQTKGLLYQLFRNLFCSYGLTEAHGKWRCADASITNDKGHDGHRTPTWWLTGSNLTLSVNNSGLFFLCGNGVYKGFPPKWSGRCGLGYLVPSLTRYLTLNASQITNLRSFIHKVTPHRCTQGDTDNPPLYCNPKDNSTIRALFPSLGTYDLEKAILNISKAMEQEFSATKQTLEAHQSKVSSLASASRKDHVLDIPTTQRQTACGTVGKQCCLYINYSEEIKSNIQRLHEASENLKNVPLL

SEQ ID NO: 854 - protein, 450 aa, Homo sapiens
HLLAPVFRTLSILTNQSNCWLCEHLDNAEQPELVFVPASASTWWTYSGQWMYERVWYPQAEVQNHSTSSYRKVTWHWEASMEAQGLSFAQVRLLEGNFSLCVENKNGSGPFLGNIPKQYCNQILWFDSTDGTFMPSIDVTNESRNDDDDTSVCLGTRQCSWFAGCTNRTWNSSAVPLIGLPNTQDYKWVDRNSGLTWSGNDTCLYSCQNQTKGLLYQLFRNLFCSYGLTEAHGKWRCADASITNDKGHDGHRTPTWWLTGSNLTLSVNNSGLFFLCGNGVYKGFPPKWSGRCGLGYLVPSLTRYLTLNASQITNLRSFIHKVTPHRCTQGDTDNPPLYCNPKDNSTIRALFPSLGTYDLEKAILNISKAMEQEFSATKQTLEAHQSKVSSLASASRKDHVLDIPTTQRQTACGTVGKQCCLYINYSEEIKSNIQRLHEASENLKNVPLLD

SEQ ID NO: 855 - protein, 451 aa, Homo sapiens
HLLAPVFRTLSILTNQSNCWLCEHLDNAEQPELVFVPASASTWWTYSGQWMYERVWYPQAEVQNHSTSSYRKVTWHWEASMEAQGLSFAQVRLLEGNFSLCVENKNGSGPFLGNIPKQYCNQILWFDSTDGTFMPSIDVTNESRNDDDDTSVCLGTRQCSWFAGCTNRTWNSSAVPLIGLPNTQDYKWVDRNSGLTWSGNDTCLYSCQNQTKGLLYQLFRNLFCSYGLTEAHGKWRCADASITNDKGHDGHRTPTWWLTGSNLTLSVNNSGLFFLCGNGVYKGFPPKWSGRCGLGYLVPSLTRYLTLNASQITNLRSFIHKVTPHRCTQGDTDNPPLYCNPKDNSTIRALFPSLGTYDLEKAILNISKAMEQEFSATKQTLEAHQSKVSSLASASRKDHVLDIPTTQRQTACGTVGKQCCLYINYSEEIKSNIQRLHEASENLKNVPLLDW

SEQ ID NO: 856 - protein, 452 aa, Homo sapiens
HLLAPVFRTLSILTNQSNCWLCEHLDNAEQPELVFVPASASTWWTYSGQWMYERVWYPQAEVQNHSTSSYRKVTWHWEASMEAQGLSFAQVRLLEGNFSLCVENKNGSGPFLGNIPKQYCNQILWFDSTDGTFMPSIDVTNESRNDDDDTSVCLGTRQCSWFAGCTNRTWNSSAVPLIGLPNTQDYKWVDRNSGLTWSGNDTCLYSCQNQTKGLLYQLFRNLFCSYGLTEAHGKWRCADASITNDKGHDGHRTPTWWLTGSNLTLSVNNSGLFFLCGNGVYKGFPPKWSGRCGLGYLVPSLTRYLTLNASQITNLRSFIHKVTPHRCTQGDTDNPPLYCNPKDNSTIRALFPSLGTYDLEKAILNISKAMEQEFSATKQTLEAHQSKVSSLASASRKDHVLDIPTTQRQTACGTVGKQCCLYINYSEEIKSNIQRLHEASENLKNVPLLDWQ

SEQ ID NO: 857 - protein, 453 aa, Homo sapiens
HLLAPVFRTLSILTNQSNCWLCEHLDNAEQPELVFVPASASTWWTYSGQWMYERVWYPQAEVQNHSTSSYRKVTWHWEASMEAQGLSFAQVRLLEGNFSLCVENKNGSGPFLGNIPKQYCNQILWFDSTDGTFMPSIDVTNESRNDDDDTSVCLGTRQCSWFAGCTNRTWNSSAVPLIGLPNTQDYKWVDRNSGLTWSGNDTCLYSCQNQTKGLLYQLFRNLFCSYGLTEAHGKWRCADASITNDKGHDGHRTPTWWLTGSNLTLSVNNSGLFFLCGNGVYKGFPPKWSGRCGLGYLVPSLTRYLTLNASQITNLRSFIHKVTPHRCTQGDTDNPPLYCNPKDNSTIRALFPSLGTYDLEKAILNISKAMEQEFSATKQTLEAHQSKVSSLASASRKDHVLDIPTTQRQTACGTVGKQCCLYINYSEEIKSNIQRLHEASENLKNVPLLDWQG

SEQ ID NO: 858 - protein, 454 aa, Homo sapiens
HLLAPVFRTLSILTNQSNCWLCEHLDNAEQPELVFVPASASTWWTYSGQWMYERVWYPQAEVQNHSTSSYRKVTWHWEASMEAQGLSFAQVRLLEGNFSLCVENKNGSGPFLGNIPKQYCNQILWFDSTDGTFMPSIDVTNESRNDDDDTSVCLGTRQCSWFAGCTNRTWNSSAVPLIGLPNTQDYKWVDRNSGLTWSGNDTCLYSCQNQTKGLLYQLFRNLFCSYGLTEAHGKWRCADASITNDKGHDGHRTPTWWLTGSNLTLSVNNSGLFFLCGNGVYKGFPPKWSGRCGLGYLVPSLTRYLTLNASQITNLRSFIHKVTPHRCTQGDTDNPPLYCNPKDNSTIRALFPSLGTYDLEKAILNISKAMEQEFSATKQTLEAHQSKVSSLASASRKDHVLDIPTTQRQTACGTVGKQCCLYINYSEEIKSNIQRLHEASENLKNVPLLDWQGI

SEQ ID NO: 859 - protein, 455 aa, Homo sapiens
HLLAPVFRTLSILTNQSNCWLCEHLDNAEQPELVFVPASASTWWTYSGQWMYERVWYPQAEVQNHSTSSYRKVTWHWEASMEAQGLSFAQVRLLEGNFSLCVENKNGSGPFLGNIPKQYCNQILWFDSTDGTFMPSIDVTNESRNDDDDTSVCLGTRQCSWFAGCTNRTWNSSAVPLIGLPNTQDYKWVDRNSGLTWSGNDTCLYSCQNQTKGLLYQLFRNLFCSYGLTEAHGKWRCADASITNDKGHDGHRTPTWWLTGSNLTLSVNNSGLFFLCGNGVYKGFPPKWSGRCGLGYLVPSLTRYLTLNASQITNLRSFIHKVTPHRCTQGDTDNPPLYCNPKDNSTIRALFPSLGTYDLEKAILNISKAMEQEFSATKQTLEAHQSKVSSLASASRKDHVLDIPTTQRQTACGTVGKQCCLYINYSEEIKSNIQRLHEASENLKNVPLLDWQGIF

SEQ ID NO: 860 - protein, 18 aa, Homo sapiens
PLLDWQGIFAKVGDWFRS

SEQ ID NO: 861 - protein, 17 aa, Homo sapiens
LLDWQGIFAKVGDWFRS

SEQ ID NO: 862 - protein, 16 aa, Homo sapiens
LDWQGIFAKVGDWFRS

SEQ ID NO: 863 - protein, 15 aa, Homo sapiens
DWQGIFAKVGDWFRS

SEQ ID NO: 864 - protein, 14 aa, Homo sapiens
WQGIFAKVGDWFRS

SEQ ID NO: 865 - protein, 13 aa, Homo sapiens
QGIFAKVGDWFRS

SEQ ID NO: 866 - protein, 12 aa, Homo sapiens
GIFAKVGDWFRS

SEQ ID NO: 867 - protein, 11 aa, Homo sapiens
IFAKVGDWFRS

SEQ ID NO: 868 - protein, 10 aa, Homo sapiens
FAKVGDWFRS

SEQ ID NO: 869 - protein, 9 aa, Homo sapiens
AKVGDWFRS

SEQ ID NO: 870 - protein, 17 aa, Homo sapiens
PLLDWQGIFAKVGDWFR

SEQ ID NO: 871 - protein, 16 aa, Homo sapiens
LLDWQGIFAKVGDWFR

SEQ ID NO: 872 - protein, 15 aa, Homo sapiens
LDWQGIFAKVGDWFR

SEQ ID NO: 873 - protein, 14 aa, Homo sapiens
DWQGIFAKVGDWFR

SEQ ID NO: 874 - protein, 13 aa, Homo sapiens
WQGIFAKVGDWFR

SEQ ID NO: 875 - protein, 12 aa, Homo sapiens
QGIFAKVGDWFR

SEQ ID NO: 876 - protein, 11 aa, Homo sapiens
GIFAKVGDWFR

SEQ ID NO: 877 - protein, 10 aa, Homo sapiens
IFAKVGDWFR

SEQ ID NO: 878 - protein, 9 aa, Homo sapiens
FAKVGDWFR

SEQ ID NO: 879 - protein, 8 aa, Homo sapiens
AKVGDWFR

SEQ ID NO: 880 - protein, 15 aa, Homo sapiens
PLLDWQGIFAKVGDW

SEQ ID NO: 881 - protein, 14 aa, Homo sapiens
LLDWQGIFAKVGDW

SEQ ID NO: 882 - protein, 13 aa, Homo sapiens
LDWQGIFAKVGDW

SEQ ID NO: 883 - protein, 12 aa, Homo sapiens
DWQGIFAKVGDW

SEQ ID NO: 884 - protein, 11 aa, Homo sapiens
WQGIFAKVGDW

SEQ ID NO: 885 - protein, 10 aa, Homo sapiens
QGIFAKVGDW

SEQ ID NO: 886 - protein, 9 aa, Homo sapiens
GIFAKVGDW

SEQ ID NO: 887 - protein, 8 aa, Homo sapiens
IFAKVGDW

SEQ ID NO: 888 - protein, 7 aa, Homo sapiens
FAKVGDW

SEQ ID NO: 889 - protein, 6 aa, Homo sapiens
AKVGDW

SEQ ID NO: 890 - protein, 15 aa, Homo sapiens
PLLDWQGIFAKVGDW

SEQ ID NO: 891 - protein, 14 aa, Homo sapiens
LLDWQGIFAKVGDW

SEQ ID NO: 892 - protein, 13 aa, Homo sapiens
LDWQGIFAKVGDW

SEQ ID NO: 893 - protein, 12 aa, Homo sapiens
DWQGIFAKVGDW

SEQ ID NO: 894 - protein, 11 aa, Homo sapiens
WQGIFAKVGDW

SEQ ID NO: 895 - protein, 10 aa, Homo sapiens
QGIFAKVGDW

SEQ ID NO: 896 - protein, 9 aa, Homo sapiens
GIFAKVGDW

SEQ ID NO: 897 - protein, 8 aa, Homo sapiens
IFAKVGDW

SEQ ID NO: 898 - protein, 7 aa, Homo sapiens
FAKVGDW

SEQ ID NO: 899 - protein, 6 aa, Homo sapiens
AKVGDW

SEQ ID NO: 900 - protein, 92 aa, Homo sapiens
PLLDWQGIFAKVGDWFRSWGYVLLIVLFCLFIFVLIYVRVFRKSRRSLNSQPLNLALSPQQSAQLLVSETSCQVSNRAMKGLTTHQYDTSLL

SEQ ID NO: 901 - protein, 91 aa, Homo sapiens
LLDWQGIFAKVGDWFRSWGYVLLIVLFCLFIFVLIYVRVFRKSRRSLNSQPLNLALSPQQSAQLLVSETSCQVSNRAMKGLTTHQYDTSLL

SEQ ID NO: 902 - protein, 90 aa, Homo sapiens
LDWQGIFAKVGDWFRSWGYVLLIVLFCLFIFVLIYVRVFRKSRRSLNSQPLNLALSPQQSAQLLVSETSCQVSNRAMKGLTTHQYDTSLL

SEQ ID NO: 903 - protein, 89 aa, Homo sapiens
DWQGIFAKVGDWFRSWGYVLLIVLFCLFIFVLIYVRVFRKSRRSLNSQPLNLALSPQQSAQLLVSETSCQVSNRAMKGLTTHQYDTSLL

SEQ ID NO: 904 - protein, 88 aa, Homo sapiens
WQGIFAKVGDWFRSWGYVLLIVLFCLFIFVLIYVRVFRKSRRSLNSQPLNLALSPQQSAQLLVSETSCQVSNRAMKGLTTHQYDTSLL

SEQ ID NO: 905 - protein, 87 aa, Homo sapiens
QGIFAKVGDWFRSWGYVLLIVLFCLFIFVLIYVRVFRKSRRSLNSQPLNLALSPQQSAQLLVSETSCQVSNRAMKGLTTHQYDTSLL

SEQ ID NO: 906 - protein, 86 aa, Homo sapiens
GIFAKVGDWFRSWGYVLLIVLFCLFIFVLIYVRVFRKSRRSLNSQPLNLALSPQQSAQLLVSETSCQVSNRAMKGLTTHQYDTSLL

SEQ ID NO: 907 - protein, 85 aa, Homo sapiens
IFAKVGDWFRSWGYVLLIVLFCLFIFVLIYVRVFRKSRRSLNSQPLNLALSPQQSAQLLVSETSCQVSNRAMKGLTTHQYDTSLL

SEQ ID NO: 908 - protein, 84 aa, Homo sapiens
FAKVGDWFRSWGYVLLIVLFCLFIFVLIYVRVFRKSRRSLNSQPLNLALSPQQSAQLLVSETSCQVSNRAMKGLTTHQYDTSLL

SEQ ID NO: 909 - protein, 83 aa, Homo sapiens
AKVGDWFRSWGYVLLIVLFCLFIFVLIYVRVFRKSRRSLNSQPLNLALSPQQSAQLLVSETSCQVSNRAMKGLTTHQYDTSLL

SEQ ID NO: 910 - protein, 463 aa, Homo sapiens
QHLLAPVFRTLSILTNQSNCWLCEHLDNAEQPELVFVPASASTWWTYSGQWMYERVWYPQAEVQNHSTSSYRKVTWHWEASMEAQGLSFAQVRLLEGNFSLCVENKNGSGPFLGNIPKQYCNQILWFDSTDGTFMPSIDVTNESRNDDDDTSVCLGTRQCSWFAGCTNRTWNSSAVPLIGLPNTQDYKWVDRNSGLTWSGNDTCLYSCQNQTKGLLYQLFRNLFCSYGLTEAHGKWRCADASITNDKGHDGHRTPTWWLTGSNLTLSVNNSGLFFLCGNGVYKGFPPKWSGRCGLGYLVPSLTRYLTLNASQITNLRSFIHKVTPHRCTQGDTDNPPLYCNPKDNSTIRALFPSLGTYDLEKAILNISKAMEQEFSATKQTLEAHQSKVSSLASASRKDHVLDIPTTQRQTACGTVGKQCCLYINYSEEIKSNIQRLHEASENLKNVPLLDWQGIFAKVGDWF

SEQ ID NO: 911 - protein, 466 aa, Homo sapiens
QHLLAPVFRTLSILTNQSNCWLCEHLDNAEQPELVFVPASASTWWTYSGQWMYERVWYPQAEVQNHSTSSYRKVTWHWEASMEAQGLSFAQVRLLEGNFSLCVENKNGSGPFLGNIPKQYCNQILWFDSTDGTFMPSIDVTNESRNDDDDTSVCLGTRQCSWFAGCTNRTWNSSAVPLIGLPNTQDYKWVDRNSGLTWSGNDTCLYSCQNQTKGLLYQLFRNLFCSYGLTEAHGKWRCADASITNDKGHDGHRTPTWWLTGSNLTLSVNNSGLFFLCGNGVYKGFPPKWSGRCGLGYLVPSLTRYLTLNASQITNLRSFIHKVTPHRCTQGDTDNPPLYCNPKDNSTIRALFPSLGTYDLEKAILNISKAMEQEFSATKQTLEAHQSKVSSLASASRKDHVLDIPTTQRQTACGTVGKQCCLYINYSEEIKSNIQRLHEASENLKNVPLLDWQGIFAKVGDWFRSW

SEQ ID NO: 912 - protein, 468 aa, Homo sapiens
QHLLAPVFRTLSILTNQSNCWLCEHLDNAEQPELVFVPASASTWWTYSGQWMYERVWYPQAEVQNHSTSSYRKVTWHWEASMEAQGLSFAQVRLLEGNFSLCVENKNGSGPFLGNIPKQYCNQILWFDSTDGTFMPSIDVTNESRNDDDDTSVCLGTRQCSWFAGCTNRTWNSSAVPLIGLPNTQDYKWVDRNSGLTWSGNDTCLYSCQNQTKGLLYQLFRNLFCSYGLTEAHGKWRCADASITNDKGHDGHRTPTWWLTGSNLTLSVNNSGLFFLCGNGVYKGFPPKWSGRCGLGYLVPSLTRYLTLNASQITNLRSFIHKVTPHRCTQGDTDNPPLYCNPKDNSTIRALFPSLGTYDLEKAILNISKAMEQEFSATKQTLEAHQSKVSSLASASRKDHVLDIPTTQRQTACGTVGKQCCLYINYSEEIKSNIQRLHEASENLKNVPLLDWQGIFAKVGDWFRSWGY

SEQ ID NO: 913 - protein, 462 aa, Homo sapiens
HLLAPVFRTLSILTNQSNCWLCEHLDNAEQPELVFVPASASTWWTYSGQWMYERVWYPQAEVQNHSTSSYRKVTWHWEASMEAQGLSFAQVRLLEGNFSLCVENKNGSGPFLGNIPKQYCNQILWFDSTDGTFMPSIDVTNESRNDDDDTSVCLGTRQCSWFAGCTNRTWNSSAVPLIGLPNTQDYKWVDRNSGLTWSGNDTCLYSCQNQTKGLLYQLFRNLFCSYGLTEAHGKWRCADASITNDKGHDGHRTPTWWLTGSNLTLSVNNSGLFFLCGNGVYKGFPPKWSGRCGLGYLVPSLTRYLTLNASQITNLRSFIHKVTPHRCTQGDTDNPPLYCNPKDNSTIRALFPSLGTYDLEKAILNISKAMEQEFSATKQTLEAHQSKVSSLASASRKDHVLDIPTTQRQTACGTVGKQCCLYINYSEEIKSNIQRLHEASENLKNVPLLDWQGIFAKVGDWF

SEQ ID NO: 914 - protein, 465 aa, Homo sapiens
HLLAPVFRTLSILTNQSNCWLCEHLDNAEQPELVFVPASASTWWTYSGQWMYERVWYPQAEVQNHSTSSYRKVTWHWEASMEAQGLSFAQVRLLEGNFSLCVENKNGSGPFLGNIPKQYCNQILWFDSTDGTFMPSIDVTNESRNDDDDTSVCLGTRQCSWFAGCTNRTWNSSAVPLIGLPNTQDYKWVDRNSGLTWSGNDTCLYSCQNQTKGLLYQLFRNLFCSYGLTEAHGKWRCADASITNDKGHDGHRTPTWWLTGSNLTLSVNNSGLFFLCGNGVYKGFPPKWSGRCGLGYLVPSLTRYLTLNASQITNLRSFIHKVTPHRCTQGDTDNPPLYCNPKDNSTIRALFPSLGTYDLEKAILNISKAMEQEFSATKQTLEAHQSKVSSLASASRKDHVLDIPTTQRQTACGTVGKQCCLYINYSEEIKSNIQRLHEASENLKNVPLLDWQGIFAKVGDWFRSW

SEQ ID NO: 915 - protein, 467 aa, Homo sapiens
HLLAPVFRTLSILTNQSNCWLCEHLDNAEQPELVFVPASASTWWTYSGQWMYERVWYPQAEVQNHSTSSYRKVTWHWEASMEAQGLSFAQVRLLEGNFSLCVENKNGSGPFLGNIPKQYCNQILWFDSTDGTFMPSIDVTNESRNDDDDTSVCLGTRQCSWFAGCTNRTWNSSAVPLIGLPNTQDYKWVDRNSGLTWSGNDTCLYSCQNQTKGLLYQLFRNLFCSYGLTEAHGKWRCADASITNDKGHDGHRTPTWWLTGSNLTLSVNNSGLFFLCGNGVYKGFPPKWSGRCGLGYLVPSLTRYLTLNASQITNLRSFIHKVTPHRCTQGDTDNPPLYCNPKDNSTIRALFPSLGTYDLEKAILNISKAMEQEFSATKQTLEAHQSKVSSLASASRKDHVLDIPTTQRQTACGTVGKQCCLYINYSEEIKSNIQRLHEASENLKNVPLLDWQGIFAKVGDWFRSWGY

SEQ ID NO: 916 - protein, 461 aa, Homo sapiens
LLAPVFRTLSILTNQSNCWLCEHLDNAEQPELVFVPASASTWWTYSGQWMYERVWYPQAEVQNHSTSSYRKVTWHWEASMEAQGLSFAQVRLLEGNFSLCVENKNGSGPFLGNIPKQYCNQILWFDSTDGTFMPSIDVTNESRNDDDDTSVCLGTRQCSWFAGCTNRTWNSSAVPLIGLPNTQDYKWVDRNSGLTWSGNDTCLYSCQNQTKGLLYQLFRNLFCSYGLTEAHGKWRCADASITNDKGHDGHRTPTWWLTGSNLTLSVNNSGLFFLCGNGVYKGFPPKWSGRCGLGYLVPSLTRYLTLNASQITNLRSFIHKVTPHRCTQGDTDNPPLYCNPKDNSTIRALFPSLGTYDLEKAILNISKAMEQEFSATKQTLEAHQSKVSSLASASRKDHVLDIPTTQRQTACGTVGKQCCLYINYSEEIKSNIQRLHEASENLKNVPLLDWQGIFAKVGDWF

SEQ ID NO: 917 - protein, 464 aa, Homo sapiens
LLAPVFRTLSILTNQSNCWLCEHLDNAEQPELVFVPASASTWWTYSGQWMYERVWYPQAEVQNHSTSSYRKVTWHWEASMEAQGLSFAQVRLLEGNFSLCVENKNGSGPFLGNIPKQYCNQILWFDSTDGTFMPSIDVTNESRNDDDDTSVCLGTRQCSWFAGCTNRTWNSSAVPLIGLPNTQDYKWVDRNSGLTWSGNDTCLYSCQNQTKGLLYQLFRNLFCSYGLTEAHGKWRCADASITNDKGHDGHRTPTWWLTGSNLTLSVNNSGLFFLCGNGVYKGFPPKWSGRCGLGYLVPSLTRYLTLNASQITNLRSFIHKVTPHRCTQGDTDNPPLYCNPKDNSTIRALFPSLGTYDLEKAILNISKAMEQEFSATKQTLEAHQSKVSSLASASRKDHVLDIPTTQRQTACGTVGKQCCLYINYSEEIKSNIQRLHEASENLKNVPLLDWQGIFAKVGDWFRSW

SEQ ID NO: 918 - protein, 466 aa, Homo sapiens
LLAPVFRTLSILTNQSNCWLCEHLDNAEQPELVFVPASASTWWTYSGQWMYERVWYPQAEVQNHSTSSYRKVTWHWEASMEAQGLSFAQVRLLEGNFSLCVENKNGSGPFLGNIPKQYCNQILWFDSTDGTFMPSIDVTNESRNDDDDTSVCLGTRQCSWFAGCTNRTWNSSAVPLIGLPNTQDYKWVDRNSGLTWSGNDTCLYSCQNQTKGLLYQLFRNLFCSYGLTEAHGKWRCADASITNDKGHDGHRTPTWWLTGSNLTLSVNNSGLFFLCGNGVYKGFPPKWSGRCGLGYLVPSLTRYLTLNASQITNLRSFIHKVTPHRCTQGDTDNPPLYCNPKDNSTIRALFPSLGTYDLEKAILNISKAMEQEFSATKQTLEAHQSKVSSLASASRKDHVLDIPTTQRQTACGTVGKQCCLYINYSEEIKSNIQRLHEASENLKNVPLLDWQGIFAKVGDWFRSWGY

SEQ ID NO: 919 - protein, 85 aa, Homo sapiens
AILNISKAMEQEFSATKQTLEAHQSKVSSLASASRKDHVLDIPTTQRQTACGTVGKQCCLYINYSEEIKSNIQRLHEASENLKNV

SEQ ID NO: 920 - protein, 151 aa, Artificial sequence
  Streptag-HTM5 peptide
MTMITPSLHAGLCILLAVVAFVGLSLGASWSHPQFEKGGGSGGGSGGGSWSHPQFEKGADDDDKTGAILNISKAMEQEFSATKQTLEAHQSKVSSLASASRKDHVLDIPTTQRQTACGTVGKQCCLYINYSEEIKSNIQRLHEASENLKNV

SEQ ID NO: 921 - protein, 351 aa, Homo sapiens
MGSLSNYALLQLTLTAFLTILVQPQHLLAPVFRTLSILTNQSNCWLCEHLDNAEQPELVFVPASASTWWTYSGQWMYERVWYPQAEVQNHSTSSYRKVTWHWEASMEAQGLSFAQVRLLEGNFSLCVENKNGSGPFLGNIPKQYCNQILWFDSTDGTFMPSIDVTNESRNDDDDTSVCLGTRQCSWFAGCTNRTWNSSAVPLIGLPNTQDYKWVDRNSGLTWSGNDTCLYSCQNQTKGLLYQLFRNLFCSYGLTEAHGKWRCADASITNDKGHDGHRTPTWWLTGSNLTLSVNNSGLFFLCGNGVYKGFPPKWSGRCGLGYLVPSLTRYLTLNASQITNLRSFIHKVTPHR

SEQ ID NO: 922 - protein, 244 aa, Artificial sequence
  TM-HEMO: internal deletion from aa 34 to 352
MGSLSNYALLQLTLTAFLTILVQPQHLLAPVFRTQGDTDNPPLYCNPKDNSTIRALFPSLGTYDLEKAILNISKAMEQEFSATKQTLEAHQSKVSSLASASRKDHVLDIPTTQRQTACGTVGKQCCLYINYSEEIKSNIQRLHEASENLKNVPLLDWQGIFAKVGDWFRSWGYVLLIVLFCLFIFVLIYVRVFRKSRRSLNSQPLNLALSPQQSAQLLVSETSCQVSNRAMKGLTTHQYDTSLL

SEQ ID NO: 923 - protein, 164 aa, Artificial sequence
  post-SHED-HEMO: internal deletion from aa 34 to 432
MGSLSNYALLQLTLTAFLTILVQPQHLLAPVFRRQTACGTVGKQCCLYINYSEEIKSNIQRLHEASENLKNVPLLDWQGIFAKVGDWFRSWGYVLLIVLFCLFIFVLIYVRVFRKSRRSLNSQPLNLALSPQQSAQLLVSETSCQVSNRAMKGLTTHQYDTSLL

SEQ ID NO: 924 - protein, 27 aa, Homo sapiens
ENLKNVPLLDWQGIFAKVGDWFRSWGY

SEQ ID NO: 925 - protein, 26 aa, Homo sapiens
ENLKNVPLLDWQGIFAKVGDWFRSWG

SEQ ID NO: 926 - protein, 25 aa, Homo sapiens
ENLKNVPLLDWQGIFAKVGDWFRSW

SEQ ID NO: 927 - protein, 24 aa, Homo sapiens
ENLKNVPLLDWQGIFAKVGDWFRS

SEQ ID NO: 928 - protein, 23 aa, Homo sapiens
ENLKNVPLLDWQGIFAKVGDWFR

SEQ ID NO: 929 - protein, 26 aa, Homo sapeins
NLKNVPLLDWQGIFAKVGDWFRSWGY

SEQ ID NO: 930 - protein, 25 aa, Homo sapiens
NLKNVPLLDWQGIFAKVGDWFRSWG

SEQ ID NO: 931 - protein, 24 aa, Homo sapiens
NLKNVPLLDWQGIFAKVGDWFRSW

SEQ ID NO: 932 - protein, 23 aa, Homo sapiens
NLKNVPLLDWQGIFAKVGDWFRS

SEQ ID NO: 933 - protein, 22 aa, Homo sapiens
NLKNVPLLDWQGIFAKVGDWFR

SEQ ID NO: 934 - protein, 25 aa, Homo sapiens
LKNVPLLDWQGIFAKVGDWFRSWGY

SEQ ID NO: 935 - protein, 24 aa, Homo sapiens
LKNVPLLDWQGIFAKVGDWFRSWG

SEQ ID NO: 936 - protein, 23 aa, Homo sapiens
LKNVPLLDWQGIFAKVGDWFRSW

SEQ ID NO: 937 - protein, 22 aa, Homo sapiens
LKNVPLLDWQGIFAKVGDWFRS

SEQ ID NO: 938 - protein, 21 aa, Homo sapiens
LKNVPLLDWQGIFAKVGDWFR

SEQ ID NO: 939 - protein, 19 aa, Homo sapiens
LKNVPLLDWQGIFAKVGDW

SEQ ID NO: 940 - protein, 22 aa, Felis catus
MGSLSNCVLLQLTIIAFSTIQA

SEQ ID NO: 941 - protein, 23 aa, Felis catus
MGSLSNCVLLQLTIIAFSTIQAQ

SEQ ID NO: 942 - protein, 24 aa, Felis catus
MGSLSNCVLLQLTIIAFSTIQAQS

SEQ ID NO: 943 - protein, 25 aa, Felis catus
MGSLSNCVLLQLTIIAFSTIQAQSR

SEQ ID NO: 944 - protein, 26 aa, Felis catus
MGSLSNCVLLQLTIIAFSTIQAQSRY

SEQ ID NO: 945 - protein, 463 aa, Felis catus
QSRYPLPPLFQTLATLANLSDCWLCQHLDNAQEPELVFVPAHASTWWTHSGQWMHKREWYPQTRGHNHSTSSYGRVLWHWETSAEAQGLSLTQVRLLEGNFSVCIENKNGTGPFLGDVPKQYCNQTVWFDSTDGTFRPSIDVANESKTDYYDANVCLVTGQYSWFAGHTTGTWNSSPFPLVGLPNTQDYIWVDQNSGMTWLGNDTYLYSCQNQTKGLLYQIFRNLFCSYRLTEAHGKWRCADANITNDKGHGGHPMPAWWVTRSTLTLSVNNSGLFILCGNKVYKEFPPNWSGRCGLGYLAPSVSQYPAFNGSQITGVGSLIHKVAPHRRTQRDVIDPPPVYHNPNSLRALFSRLGTSDLEEAILNISKATEQGLAATVQTSEARQSRVSSLLSALQNHHLDLSAAQQGRTCTIVGNQCCLYVNKSKEVRFLLNSVKERIDSRRRMRELAFNWTDLVSGVRDW

SEQ ID NO: 946 - protein, 464 aa, Felis catus
QSRYPLPPLFQTLATLANLSDCWLCQHLDNAQEPELVFVPAHASTWWTHSGQWMHKREWYPQTRGHNHSTSSYGRVLWHWETSAEAQGLSLTQVRLLEGNFSVCIENKNGTGPFLGDVPKQYCNQTVWFDSTDGTFRPSIDVANESKTDYYDANVCLVTGQYSWFAGHTTGTWNSSPFPLVGLPNTQDYIWVDQNSGMTWLGNDTYLYSCQNQTKGLLYQIFRNLFCSYRLTEAHGKWRCADANITNDKGHGGHPMPAWWVTRSTLTLSVNNSGLFILCGNKVYKEFPPNWSGRCGLGYLAPSVSQYPAFNGSQITGVGSLIHKVAPHRRTQRDVIDPPPVYHNPNSLRALFSRLGTSDLEEAILNISKATEQGLAATVQTSEARQSRVSSLLSALQNHHLDLSAAQQGRTCTIVGNQCCLYVNKSKEVRFLLNSVKERIDSRRRMRELAFNWTDLVSGVRDWF

SEQ ID NO: 947 - protein, 465 aa, Felis catus
QSRYPLPPLFQTLATLANLSDCWLCQHLDNAQEPELVFVPAHASTWWTHSGQWMHKREWYPQTRGHNHSTSSYGRVLWHWETSAEAQGLSLTQVRLLEGNFSVCIENKNGTGPFLGDVPKQYCNQTVWFDSTDGTFRPSIDVANESKTDYYDANVCLVTGQYSWFAGHTTGTWNSSPFPLVGLPNTQDYIWVDQNSGMTWLGNDTYLYSCQNQTKGLLYQIFRNLFCSYRLTEAHGKWRCADANITNDKGHGGHPMPAWWVTRSTLTLSVNNSGLFILCGNKVYKEFPPNWSGRCGLGYLAPSVSQYPAFNGSQITGVGSLIHKVAPHRRTQRDVIDPPPVYHNPNSLRALFSRLGTSDLEEAILNISKATEQGLAATVQTSEARQSRVSSLLSALQNHHLDLSAAQQGRTCTIVGNQCCLYVNKSKEVRFLLNSVKERIDSRRRMRELAFNWTDLVSGVRDWFS

SEQ ID NO: 948 - protein, 466 aa, Felis catus
QSRYPLPPLFQTLATLANLSDCWLCQHLDNAQEPELVFVPAHASTWWTHSGQWMHKREWYPQTRGHNHSTSSYGRVLWHWETSAEAQGLSLTQVRLLEGNFSVCIENKNGTGPFLGDVPKQYCNQTVWFDSTDGTFRPSIDVANESKTDYYDANVCLVTGQYSWFAGHTTGTWNSSPFPLVGLPNTQDYIWVDQNSGMTWLGNDTYLYSCQNQTKGLLYQIFRNLFCSYRLTEAHGKWRCADANITNDKGHGGHPMPAWWVTRSTLTLSVNNSGLFILCGNKVYKEFPPNWSGRCGLGYLAPSVSQYPAFNGSQITGVGSLIHKVAPHRRTQRDVIDPPPVYHNPNSLRALFSRLGTSDLEEAILNISKATEQGLAATVQTSEARQSRVSSLLSALQNHHLDLSAAQQGRTCTIVGNQCCLYVNKSKEVRFLLNSVKERIDSRRRMRELAFNWTDLVSGVRDWFSG

SEQ ID NO: 949 - protein, 467 aa, Felis catus
QSRYPLPPLFQTLATLANLSDCWLCQHLDNAQEPELVFVPAHASTWWTHSGQWMHKREWYPQTRGHNHSTSSYGRVLWHWETSAEAQGLSLTQVRLLEGNFSVCIENKNGTGPFLGDVPKQYCNQTVWFDSTDGTFRPSIDVANESKTDYYDANVCLVTGQYSWFAGHTTGTWNSSPFPLVGLPNTQDYIWVDQNSGMTWLGNDTYLYSCQNQTKGLLYQIFRNLFCSYRLTEAHGKWRCADANITNDKGHGGHPMPAWWVTRSTLTLSVNNSGLFILCGNKVYKEFPPNWSGRCGLGYLAPSVSQYPAFNGSQITGVGSLIHKVAPHRRTQRDVIDPPPVYHNPNSLRALFSRLGTSDLEEAILNISKATEQGLAATVQTSEARQSRVSSLLSALQNHHLDLSAAQQGRTCTIVGNQCCLYVNKSKEVRFLLNSVKERIDSRRRMRELAFNWTDLVSGVRDWFSGH

SEQ ID NO: 950 - protein, 468 aa, Felis catus
QSRYPLPPLFQTLATLANLSDCWLCQHLDNAQEPELVFVPAHASTWWTHSGQWMHKREWYPQTRGHNHSTSSYGRVLWHWETSAEAQGLSLTQVRLLEGNFSVCIENKNGTGPFLGDVPKQYCNQTVWFDSTDGTFRPSIDVANESKTDYYDANVCLVTGQYSWFAGHTTGTWNSSPFPLVGLPNTQDYIWVDQNSGMTWLGNDTYLYSCQNQTKGLLYQIFRNLFCSYRLTEAHGKWRCADANITNDKGHGGHPMPAWWVTRSTLTLSVNNSGLFILCGNKVYKEFPPNWSGRCGLGYLAPSVSQYPAFNGSQITGVGSLIHKVAPHRRTQRDVIDPPPVYHNPNSLRALFSRLGTSDLEEAILNISKATEQGLAATVQTSEARQSRVSSLLSALQNHHLDLSAAQQGRTCTIVGNQCCLYVNKSKEVRFLLNSVKERIDSRRRMRELAFNWTDLVSGVRDWFSGHW

SEQ ID NO: 951 - protein, 469 aa, Felis catux
QSRYPLPPLFQTLATLANLSDCWLCQHLDNAQEPELVFVPAHASTWWTHSGQWMHKREWYPQTRGHNHSTSSYGRVLWHWETSAEAQGLSLTQVRLLEGNFSVCIENKNGTGPFLGDVPKQYCNQTVWFDSTDGTFRPSIDVANESKTDYYDANVCLVTGQYSWFAGHTTGTWNSSPFPLVGLPNTQDYIWVDQNSGMTWLGNDTYLYSCQNQTKGLLYQIFRNLFCSYRLTEAHGKWRCADANITNDKGHGGHPMPAWWVTRSTLTLSVNNSGLFILCGNKVYKEFPPNWSGRCGLGYLAPSVSQYPAFNGSQITGVGSLIHKVAPHRRTQRDVIDPPPVYHNPNSLRALFSRLGTSDLEEAILNISKATEQGLAATVQTSEARQSRVSSLLSALQNHHLDLSAAQQGRTCTIVGNQCCLYVNKSKEVRFLLNSVKERIDSRRRMRELAFNWTDLVSGVRDWFSGHWG

SEQ ID NO: 952 - protein, 462 aa, Felis catus
SRYPLPPLFQTLATLANLSDCWLCQHLDNAQEPELVFVPAHASTWWTHSGQWMHKREWYPQTRGHNHSTSSYGRVLWHWETSAEAQGLSLTQVRLLEGNFSVCIENKNGTGPFLGDVPKQYCNQTVWFDSTDGTFRPSIDVANESKTDYYDANVCLVTGQYSWFAGHTTGTWNSSPFPLVGLPNTQDYIWVDQNSGMTWLGNDTYLYSCQNQTKGLLYQIFRNLFCSYRLTEAHGKWRCADANITNDKGHGGHPMPAWWVTRSTLTLSVNNSGLFILCGNKVYKEFPPNWSGRCGLGYLAPSVSQYPAFNGSQITGVGSLIHKVAPHRRTQRDVIDPPPVYHNPNSLRALFSRLGTSDLEEAILNISKATEQGLAATVQTSEARQSRVSSLLSALQNHHLDLSAAQQGRTCTIVGNQCCLYVNKSKEVRFLLNSVKERIDSRRRMRELAFNWTDLVSGVRDW

SEQ ID NO: 953 - protein, 463 aa, Felis catus
SRYPLPPLFQTLATLANLSDCWLCQHLDNAQEPELVFVPAHASTWWTHSGQWMHKREWYPQTRGHNHSTSSYGRVLWHWETSAEAQGLSLTQVRLLEGNFSVCIENKNGTGPFLGDVPKQYCNQTVWFDSTDGTFRPSIDVANESKTDYYDANVCLVTGQYSWFAGHTTGTWNSSPFPLVGLPNTQDYIWVDQNSGMTWLGNDTYLYSCQNQTKGLLYQIFRNLFCSYRLTEAHGKWRCADANITNDKGHGGHPMPAWWVTRSTLTLSVNNSGLFILCGNKVYKEFPPNWSGRCGLGYLAPSVSQYPAFNGSQITGVGSLIHKVAPHRRTQRDVIDPPPVYHNPNSLRALFSRLGTSDLEEAILNISKATEQGLAATVQTSEARQSRVSSLLSALQNHHLDLSAAQQGRTCTIVGNQCCLYVNKSKEVRFLLNSVKERIDSRRRMRELAFNWTDLVSGVRDWF

SEQ ID NO: 954 - protein, 464 aa, Felis catus
SRYPLPPLFQTLATLANLSDCWLCQHLDNAQEPELVFVPAHASTWWTHSGQWMHKREWYPQTRGHNHSTSSYGRVLWHWETSAEAQGLSLTQVRLLEGNFSVCIENKNGTGPFLGDVPKQYCNQTVWFDSTDGTFRPSIDVANESKTDYYDANVCLVTGQYSWFAGHTTGTWNSSPFPLVGLPNTQDYIWVDQNSGMTWLGNDTYLYSCQNQTKGLLYQIFRNLFCSYRLTEAHGKWRCADANITNDKGHGGHPMPAWWVTRSTLTLSVNNSGLFILCGNKVYKEFPPNWSGRCGLGYLAPSVSQYPAFNGSQITGVGSLIHKVAPHRRTQRDVIDPPPVYHNPNSLRALFSRLGTSDLEEAILNISKATEQGLAATVQTSEARQSRVSSLLSALQNHHLDLSAAQQGRTCTIVGNQCCLYVNKSKEVRFLLNSVKERIDSRRRMRELAFNWTDLVSGVRDWFS

SEQ ID NO: 955 - protein, 465 aa, Felis catus
SRYPLPPLFQTLATLANLSDCWLCQHLDNAQEPELVFVPAHASTWWTHSGQWMHKREWYPQTRGHNHSTSSYGRVLWHWETSAEAQGLSLTQVRLLEGNFSVCIENKNGTGPFLGDVPKQYCNQTVWFDSTDGTFRPSIDVANESKTDYYDANVCLVTGQYSWFAGHTTGTWNSSPFPLVGLPNTQDYIWVDQNSGMTWLGNDTYLYSCQNQTKGLLYQIFRNLFCSYRLTEAHGKWRCADANITNDKGHGGHPMPAWWVTRSTLTLSVNNSGLFILCGNKVYKEFPPNWSGRCGLGYLAPSVSQYPAFNGSQITGVGSLIHKVAPHRRTQRDVIDPPPVYHNPNSLRALFSRLGTSDLEEAILNISKATEQGLAATVQTSEARQSRVSSLLSALQNHHLDLSAAQQGRTCTIVGNQCCLYVNKSKEVRFLLNSVKERIDSRRRMRELAFNWTDLVSGVRDWFSG

SEQ ID NO: 956 - protein, 466 aa, Felis catus
SRYPLPPLFQTLATLANLSDCWLCQHLDNAQEPELVFVPAHASTWWTHSGQWMHKREWYPQTRGHNHSTSSYGRVLWHWETSAEAQGLSLTQVRLLEGNFSVCIENKNGTGPFLGDVPKQYCNQTVWFDSTDGTFRPSIDVANESKTDYYDANVCLVTGQYSWFAGHTTGTWNSSPFPLVGLPNTQDYIWVDQNSGMTWLGNDTYLYSCQNQTKGLLYQIFRNLFCSYRLTEAHGKWRCADANITNDKGHGGHPMPAWWVTRSTLTLSVNNSGLFILCGNKVYKEFPPNWSGRCGLGYLAPSVSQYPAFNGSQITGVGSLIHKVAPHRRTQRDVIDPPPVYHNPNSLRALFSRLGTSDLEEAILNISKATEQGLAATVQTSEARQSRVSSLLSALQNHHLDLSAAQQGRTCTIVGNQCCLYVNKSKEVRFLLNSVKERIDSRRRMRELAFNWTDLVSGVRDWFSGH

SEQ ID NO: 957 - protein, 467 aa, Felis catus
SRYPLPPLFQTLATLANLSDCWLCQHLDNAQEPELVFVPAHASTWWTHSGQWMHKREWYPQTRGHNHSTSSYGRVLWHWETSAEAQGLSLTQVRLLEGNFSVCIENKNGTGPFLGDVPKQYCNQTVWFDSTDGTFRPSIDVANESKTDYYDANVCLVTGQYSWFAGHTTGTWNSSPFPLVGLPNTQDYIWVDQNSGMTWLGNDTYLYSCQNQTKGLLYQIFRNLFCSYRLTEAHGKWRCADANITNDKGHGGHPMPAWWVTRSTLTLSVNNSGLFILCGNKVYKEFPPNWSGRCGLGYLAPSVSQYPAFNGSQITGVGSLIHKVAPHRRTQRDVIDPPPVYHNPNSLRALFSRLGTSDLEEAILNISKATEQGLAATVQTSEARQSRVSSLLSALQNHHLDLSAAQQGRTCTIVGNQCCLYVNKSKEVRFLLNSVKERIDSRRRMRELAFNWTDLVSGVRDWFSGHW

SEQ ID NO: 958 - protein, 468 aa, Felis catus
SRYPLPPLFQTLATLANLSDCWLCQHLDNAQEPELVFVPAHASTWWTHSGQWMHKREWYPQTRGHNHSTSSYGRVLWHWETSAEAQGLSLTQVRLLEGNFSVCIENKNGTGPFLGDVPKQYCNQTVWFDSTDGTFRPSIDVANESKTDYYDANVCLVTGQYSWFAGHTTGTWNSSPFPLVGLPNTQDYIWVDQNSGMTWLGNDTYLYSCQNQTKGLLYQIFRNLFCSYRLTEAHGKWRCADANITNDKGHGGHPMPAWWVTRSTLTLSVNNSGLFILCGNKVYKEFPPNWSGRCGLGYLAPSVSQYPAFNGSQITGVGSLIHKVAPHRRTQRDVIDPPPVYHNPNSLRALFSRLGTSDLEEAILNISKATEQGLAATVQTSEARQSRVSSLLSALQNHHLDLSAAQQGRTCTIVGNQCCLYVNKSKEVRFLLNSVKERIDSRRRMRELAFNWTDLVSGVRDWFSGHWG

SEQ ID NO: 959 - protein, 462 aa, Felis catus
RYPLPPLFQTLATLANLSDCWLCQHLDNAQEPELVFVPAHASTWWTHSGQWMHKREWYPQTRGHNHSTSSYGRVLWHWETSAEAQGLSLTQVRLLEGNFSVCIENKNGTGPFLGDVPKQYCNQTVWFDSTDGTFRPSIDVANESKTDYYDANVCLVTGQYSWFAGHTTGTWNSSPFPLVGLPNTQDYIWVDQNSGMTWLGNDTYLYSCQNQTKGLLYQIFRNLFCSYRLTEAHGKWRCADANITNDKGHGGHPMPAWWVTRSTLTLSVNNSGLFILCGNKVYKEFPPNWSGRCGLGYLAPSVSQYPAFNGSQITGVGSLIHKVAPHRRTQRDVIDPPPVYHNPNSLRALFSRLGTSDLEEAILNISKATEQGLAATVQTSEARQSRVSSLLSALQNHHLDLSAAQQGRTCTIVGNQCCLYVNKSKEVRFLLNSVKERIDSRRRMRELAFNWTDLVSGVRDWF

SEQ ID NO: 960 - protein, 463 aa, Felis catus
RYPLPPLFQTLATLANLSDCWLCQHLDNAQEPELVFVPAHASTWWTHSGQWMHKREWYPQTRGHNHSTSSYGRVLWHWETSAEAQGLSLTQVRLLEGNFSVCIENKNGTGPFLGDVPKQYCNQTVWFDSTDGTFRPSIDVANESKTDYYDANVCLVTGQYSWFAGHTTGTWNSSPFPLVGLPNTQDYIWVDQNSGMTWLGNDTYLYSCQNQTKGLLYQIFRNLFCSYRLTEAHGKWRCADANITNDKGHGGHPMPAWWVTRSTLTLSVNNSGLFILCGNKVYKEFPPNWSGRCGLGYLAPSVSQYPAFNGSQITGVGSLIHKVAPHRRTQRDVIDPPPVYHNPNSLRALFSRLGTSDLEEAILNISKATEQGLAATVQTSEARQSRVSSLLSALQNHHLDLSAAQQGRTCTIVGNQCCLYVNKSKEVRFLLNSVKERIDSRRRMRELAFNWTDLVSGVRDWFS

SEQ ID NO: 961 - protein, 466 aa, Felis catus
RYPLPPLFQTLATLANLSDCWLCQHLDNAQEPELVFVPAHASTWWTHSGQWMHKREWYPQTRGHNHSTSSYGRVLWHWETSAEAQGLSLTQVRLLEGNFSVCIENKNGTGPFLGDVPKQYCNQTVWFDSTDGTFRPSIDVANESKTDYYDANVCLVTGQYSWFAGHTTGTWNSSPFPLVGLPNTQDYIWVDQNSGMTWLGNDTYLYSCQNQTKGLLYQIFRNLFCSYRLTEAHGKWRCADANITNDKGHGGHPMPAWWVTRSTLTLSVNNSGLFILCGNKVYKEFPPNWSGRCGLGYLAPSVSQYPAFNGSQITGVGSLIHKVAPHRRTQRDVIDPPPVYHNPNSLRALFSRLGTSDLEEAILNISKATEQGLAATVQTSEARQSRVSSLLSALQNHHLDLSAAQQGRTCTIVGNQCCLYVNKSKEVRFLLNSVKERIDSRRRMRELAFNWTDLVSGVRDWFSGHW

SEQ ID NO: 962 - protein, 461 aa, Felis catus
YPLPPLFQTLATLANLSDCWLCQHLDNAQEPELVFVPAHASTWWTHSGQWMHKREWYPQTRGHNHSTSSYGRVLWHWETSAEAQGLSLTQVRLLEGNFSVCIENKNGTGPFLGDVPKQYCNQTVWFDSTDGTFRPSIDVANESKTDYYDANVCLVTGQYSWFAGHTTGTWNSSPFPLVGLPNTQDYIWVDQNSGMTWLGNDTYLYSCQNQTKGLLYQIFRNLFCSYRLTEAHGKWRCADANITNDKGHGGHPMPAWWVTRSTLTLSVNNSGLFILCGNKVYKEFPPNWSGRCGLGYLAPSVSQYPAFNGSQITGVGSLIHKVAPHRRTQRDVIDPPPVYHNPNSLRALFSRLGTSDLEEAILNISKATEQGLAATVQTSEARQSRVSSLLSALQNHHLDLSAAQQGRTCTIVGNQCCLYVNKSKEVRFLLNSVKERIDSRRRMRELAFNWTDLVSGVRDWF

SEQ ID NO: 963 - protein, 462 aa, Felis catus
YPLPPLFQTLATLANLSDCWLCQHLDNAQEPELVFVPAHASTWWTHSGQWMHKREWYPQTRGHNHSTSSYGRVLWHWETSAEAQGLSLTQVRLLEGNFSVCIENKNGTGPFLGDVPKQYCNQTVWFDSTDGTFRPSIDVANESKTDYYDANVCLVTGQYSWFAGHTTGTWNSSPFPLVGLPNTQDYIWVDQNSGMTWLGNDTYLYSCQNQTKGLLYQIFRNLFCSYRLTEAHGKWRCADANITNDKGHGGHPMPAWWVTRSTLTLSVNNSGLFILCGNKVYKEFPPNWSGRCGLGYLAPSVSQYPAFNGSQITGVGSLIHKVAPHRRTQRDVIDPPPVYHNPNSLRALFSRLGTSDLEEAILNISKATEQGLAATVQTSEARQSRVSSLLSALQNHHLDLSAAQQGRTCTIVGNQCCLYVNKSKEVRFLLNSVKERIDSRRRMRELAFNWTDLVSGVRDWFS

SEQ ID NO: 964 - protein, 465 aa, Felis catus
YPLPPLFQTLATLANLSDCWLCQHLDNAQEPELVFVPAHASTWWTHSGQWMHKREWYPQTRGHNHSTSSYGRVLWHWETSAEAQGLSLTQVRLLEGNFSVCIENKNGTGPFLGDVPKQYCNQTVWFDSTDGTFRPSIDVANESKTDYYDANVCLVTGQYSWFAGHTTGTWNSSPFPLVGLPNTQDYIWVDQNSGMTWLGNDTYLYSCQNQTKGLLYQIFRNLFCSYRLTEAHGKWRCADANITNDKGHGGHPMPAWWVTRSTLTLSVNNSGLFILCGNKVYKEFPPNWSGRCGLGYLAPSVSQYPAFNGSQITGVGSLIHKVAPHRRTQRDVIDPPPVYHNPNSLRALFSRLGTSDLEEAILNISKATEQGLAATVQTSEARQSRVSSLLSALQNHHLDLSAAQQGRTCTIVGNQCCLYVNKSKEVRFLLNSVKERIDSRRRMRELAFNWTDLVSGVRDWFSGHW

SEQ ID NO: 965 - protein, 460 aa, Felis catus
PLPPLFQTLATLANLSDCWLCQHLDNAQEPELVFVPAHASTWWTHSGQWMHKREWYPQTRGHNHSTSSYGRVLWHWETSAEAQGLSLTQVRLLEGNFSVCIENKNGTGPFLGDVPKQYCNQTVWFDSTDGTFRPSIDVANESKTDYYDANVCLVTGQYSWFAGHTTGTWNSSPFPLVGLPNTQDYIWVDQNSGMTWLGNDTYLYSCQNQTKGLLYQIFRNLFCSYRLTEAHGKWRCADANITNDKGHGGHPMPAWWVTRSTLTLSVNNSGLFILCGNKVYKEFPPNWSGRCGLGYLAPSVSQYPAFNGSQITGVGSLIHKVAPHRRTQRDVIDPPPVYHNPNSLRALFSRLGTSDLEEAILNISKATEQGLAATVQTSEARQSRVSSLLSALQNHHLDLSAAQQGRTCTIVGNQCCLYVNKSKEVRFLLNSVKERIDSRRRMRELAFNWTDLVSGVRDWF

SEQ ID NO: 966 - protein, 461 aa, Felis catus
PLPPLFQTLATLANLSDCWLCQHLDNAQEPELVFVPAHASTWWTHSGQWMHKREWYPQTRGHNHSTSSYGRVLWHWETSAEAQGLSLTQVRLLEGNFSVCIENKNGTGPFLGDVPKQYCNQTVWFDSTDGTFRPSIDVANESKTDYYDANVCLVTGQYSWFAGHTTGTWNSSPFPLVGLPNTQDYIWVDQNSGMTWLGNDTYLYSCQNQTKGLLYQIFRNLFCSYRLTEAHGKWRCADANITNDKGHGGHPMPAWWVTRSTLTLSVNNSGLFILCGNKVYKEFPPNWSGRCGLGYLAPSVSQYPAFNGSQITGVGSLIHKVAPHRRTQRDVIDPPPVYHNPNSLRALFSRLGTSDLEEAILNISKATEQGLAATVQTSEARQSRVSSLLSALQNHHLDLSAAQQGRTCTIVGNQCCLYVNKSKEVRFLLNSVKERIDSRRRMRELAFNWTDLVSGVRDWFS

SEQ ID NO: 967 - protein, 464 aa, Felis catus
PLPPLFQTLATLANLSDCWLCQHLDNAQEPELVFVPAHASTWWTHSGQWMHKREWYPQTRGHNHSTSSYGRVLWHWETSAEAQGLSLTQVRLLEGNFSVCIENKNGTGPFLGDVPKQYCNQTVWFDSTDGTFRPSIDVANESKTDYYDANVCLVTGQYSWFAGHTTGTWNSSPFPLVGLPNTQDYIWVDQNSGMTWLGNDTYLYSCQNQTKGLLYQIFRNLFCSYRLTEAHGKWRCADANITNDKGHGGHPMPAWWVTRSTLTLSVNNSGLFILCGNKVYKEFPPNWSGRCGLGYLAPSVSQYPAFNGSQITGVGSLIHKVAPHRRTQRDVIDPPPVYHNPNSLRALFSRLGTSDLEEAILNISKATEQGLAATVQTSEARQSRVSSLLSALQNHHLDLSAAQQGRTCTIVGNQCCLYVNKSKEVRFLLNSVKERIDSRRRMRELAFNWTDLVSGVRDWFSGHW

SEQ ID NO: 968 - protein, 4 aa, Felis catus
CWLC

SEQ ID NO: 969 - protein, 4 aa, Felis catus
RTQR

SEQ ID NO: 970 - protein, 16 aa, Felis catus
LQNHHLDLSAAQQGRT

SEQ ID NO: 971 - protein, 9 aa, Felis catus
CTIVGNQCC

SEQ ID NO: 972 - protein, 25 aa, Felis catus
FSGHWGHMFGFVLLGFIIVLICVAV

SEQ ID NO: 973 - protein, 24 aa, Felis catus
SGHWGHMFGFVLLGFIIVLICVAV

SEQ ID NO: 974 - protein, 23 aa, Felis catus
GHWGHMFGFVLLGFIIVLICVAV

SEQ ID NO: 975 - protein, 22 aa, Felis catus
HWGHMFGFVLLGFIIVLICVAV

SEQ ID NO: 976 - protein, 21 aa, Felis catus
WGHMFGFVLLGFIIVLICVAV

SEQ ID NO: 977 - protein, 20 aa, Felis catus
GHMFGFVLLGFIIVLICVAV

SEQ ID NO: 978 - protein, 19 aa, Felis catus
HMFGFVLLGFIIVLICVAV

SEQ ID NO: 979 - protein, 68 aa, Felis catus
RRSLTSRVPAQVSSSQHYTGLLACGTSCEVSNKETRGPAPPEGHKDSFALTASEQTAAAERGLLQTSL

SEQ ID NO: 980 - protein, 102 aa, Felis catus
GTSDLEEAILNISKATEQGLAATVQTSEARQSRVSSLLSALQNHHLDLSAAQQGRTCTIVGNQCCLYVNKSKEVRFLLNSVKERIDSRRRMRELAFNWTDLV

SEQ ID NO: 981 - protein, 28 aa, Homo sapiens
SENLKNVPLLDWQGIFAKVGDWFRSWGY

SEQ ID NO: 982 - protein, 27 aa, Homo sapiens
SENLKNVPLLDWQGIFAKVGDWFRSWG

SEQ ID NO: 983 - protein, 26 aa, Homo sapiens
SENLKNVPLLDWQGIFAKVGDWFRSW

SEQ ID NO: 984 - protein, 25 aa, Homo sapiens
SENLKNVPLLDWQGIFAKVGDWFRS

SEQ ID NO: 985 - protein, 24 aa, Homo sapiens
SENLKNVPLLDWQGIFAKVGDWFR

SEQ ID NO: 986 - protein, 20 aa, Homo sapiens
SENLKNVPLLDWQGIFAKVG

SEQ ID NO: 987 - protein, 20 aa, Homo sapiens
LLDWQGIFAKVGDWFRSWGY

SEQ ID NO: 988 - protein, 121 aa, Homo sapiens
TWWLTGSNLTLSVNNSGLFFLCGNGVYKGFPPKWSGRCGLGYLVPSLTRYLTLNASQITNLRSFIHKVTPHRCTQGDTDNPPLYCNPKDNSTIRALFPSLGTYDLEKAILNISKAMEQEFS

SEQ ID NO: 989 - protein, 187 aa, Artificial sequence
  Streptag-antigen peptide
MTMITPSLHAGLCILLAVVAFVGLSLGASWSHPQFEKGGGSGGGSGGGSWSHPQFEKGADDDDKTGTWWLTGSNLTLSVNNSGLFFLCGNGVYKGFPPKWSGRCGLGYLVPSLTRYLTLNASQITNLRSFIHKVTPHRCTQGDTDNPPLYCNPKDNSTIRALFPSLGTYDLEKAILNISKAMEQEFS

SEQ ID NO: 990 - protein, 57 aa, Homo sapiens; identical to SEQ ID NO: 11

SEQ ID NO: 991 - protein, 397 aa, Homo sapiens
QHLLAPVFRTLSILTNQSNCWLCEHLDNAEQPELVFVPASASTWWTYSGQWMYERVWYPQAEVQNHSTSSYRKVTWHWEASMEAQGLSFAQVRLLEGNFSLCVENKNGSGPFLGNIPKQYCNQILWFDSTDGTFMPSIDVTNESRNDDDDTSVCLGTRQCSWFAGCTNRTWNSSAVPLIGLPNTQDYKWVDRNSGLTWSGNDTCLYSCQNQTKGLLYQLFRNLFCSYGLTEAHGKWRCADASITNDKGHDGHRTPTWWLTGSNLTLSVNNSGLFFLCGNGVYKGFPPKWSGRCGLGYLVPSLTRYLTLNASQITNLRSFIHKVTPHRCTQGDTDNPPLYCNPKDNSTIRALFPSLGTYDLEKAILNISKAMEQEFSATKQTLEAHQSKVSSLASASR

SEQ ID NO: 992 - protein, 398 aa, Homo sapiens
QHLLAPVFRTLSILTNQSNCWLCEHLDNAEQPELVFVPASASTWWTYSGQWMYERVWYPQAEVQNHSTSSYRKVTWHWEASMEAQGLSFAQVRLLEGNFSLCVENKNGSGPFLGNIPKQYCNQILWFDSTDGTFMPSIDVTNESRNDDDDTSVCLGTRQCSWFAGCTNRTWNSSAVPLIGLPNTQDYKWVDRNSGLTWSGNDTCLYSCQNQTKGLLYQLFRNLFCSYGLTEAHGKWRCADASITNDKGHDGHRTPTWWLTGSNLTLSVNNSGLFFLCGNGVYKGFPPKWSGRCGLGYLVPSLTRYLTLNASQITNLRSFIHKVTPHRCTQGDTDNPPLYCNPKDNSTIRALFPSLGTYDLEKAILNISKAMEQEFSATKQTLEAHQSKVSSLASASRK

SEQ ID NO: 993 - protein, 399 aa, Homo sapiens
QHLLAPVFRTLSILTNQSNCWLCEHLDNAEQPELVFVPASASTWWTYSGQWMYERVWYPQAEVQNHSTSSYRKVTWHWEASMEAQGLSFAQVRLLEGNFSLCVENKNGSGPFLGNIPKQYCNQILWFDSTDGTFMPSIDVTNESRNDDDDTSVCLGTRQCSWFAGCTNRTWNSSAVPLIGLPNTQDYKWVDRNSGLTWSGNDTCLYSCQNQTKGLLYQLFRNLFCSYGLTEAHGKWRCADASITNDKGHDGHRTPTWWLTGSNLTLSVNNSGLFFLCGNGVYKGFPPKWSGRCGLGYLVPSLTRYLTLNASQITNLRSFIHKVTPHRCTQGDTDNPPLYCNPKDNSTIRALFPSLGTYDLEKAILNISKAMEQEFSATKQTLEAHQSKVSSLASASRKD

SEQ ID NO: 994 - protein, 400 aa, Homo sapiens
QHLLAPVFRTLSILTNQSNCWLCEHLDNAEQPELVFVPASASTWWTYSGQWMYERVWYPQAEVQNHSTSSYRKVTWHWEASMEAQGLSFAQVRLLEGNFSLCVENKNGSGPFLGNIPKQYCNQILWFDSTDGTFMPSIDVTNESRNDDDDTSVCLGTRQCSWFAGCTNRTWNSSAVPLIGLPNTQDYKWVDRNSGLTWSGNDTCLYSCQNQTKGLLYQLFRNLFCSYGLTEAHGKWRCADASITNDKGHDGHRTPTWWLTGSNLTLSVNNSGLFFLCGNGVYKGFPPKWSGRCGLGYLVPSLTRYLTLNASQITNLRSFIHKVTPHRCTQGDTDNPPLYCNPKDNSTIRALFPSLGTYDLEKAILNISKAMEQEFSATKQTLEAHQSKVSSLASASRKDH

SEQ ID NO: 995 - protein, 401 aa, Homo sapiens
QHLLAPVFRTLSILTNQSNCWLCEHLDNAEQPELVFVPASASTWWTYSGQWMYERVWYPQAEVQNHSTSSYRKVTWHWEASMEAQGLSFAQVRLLEGNFSLCVENKNGSGPFLGNIPKQYCNQILWFDSTDGTFMPSIDVTNESRNDDDDTSVCLGTRQCSWFAGCTNRTWNSSAVPLIGLPNTQDYKWVDRNSGLTWSGNDTCLYSCQNQTKGLLYQLFRNLFCSYGLTEAHGKWRCADASITNDKGHDGHRTPTWWLTGSNLTLSVNNSGLFFLCGNGVYKGFPPKWSGRCGLGYLVPSLTRYLTLNASQITNLRSFIHKVTPHRCTQGDTDNPPLYCNPKDNSTIRALFPSLGTYDLEKAILNISKAMEQEFSATKQTLEAHQSKVSSLASASRKDHV

SEQ ID NO: 996 - protein, 402 aa, Homo sapiens
QHLLAPVFRTLSILTNQSNCWLCEHLDNAEQPELVFVPASASTWWTYSGQWMYERVWYPQAEVQNHSTSSYRKVTWHWEASMEAQGLSFAQVRLLEGNFSLCVENKNGSGPFLGNIPKQYCNQILWFDSTDGTFMPSIDVTNESRNDDDDTSVCLGTRQCSWFAGCTNRTWNSSAVPLIGLPNTQDYKWVDRNSGLTWSGNDTCLYSCQNQTKGLLYQLFRNLFCSYGLTEAHGKWRCADASITNDKGHDGHRTPTWWLTGSNLTLSVNNSGLFFLCGNGVYKGFPPKWSGRCGLGYLVPSLTRYLTLNASQITNLRSFIHKVTPHRCTQGDTDNPPLYCNPKDNSTIRALFPSLGTYDLEKAILNISKAMEQEFSATKQTLEAHQSKVSSLASASRKDHVL

SEQ ID NO: 997 - protein, 403 aa, Homo sapiens
QHLLAPVFRTLSILTNQSNCWLCEHLDNAEQPELVFVPASASTWWTYSGQWMYERVWYPQAEVQNHSTSSYRKVTWHWEASMEAQGLSFAQVRLLEGNFSLCVENKNGSGPFLGNIPKQYCNQILWFDSTDGTFMPSIDVTNESRNDDDDTSVCLGTRQCSWFAGCTNRTWNSSAVPLIGLPNTQDYKWVDRNSGLTWSGNDTCLYSCQNQTKGLLYQLFRNLFCSYGLTEAHGKWRCADASITNDKGHDGHRTPTWWLTGSNLTLSVNNSGLFFLCGNGVYKGFPPKWSGRCGLGYLVPSLTRYLTLNASQITNLRSFIHKVTPHRCTQGDTDNPPLYCNPKDNSTIRALFPSLGTYDLEKAILNISKAMEQEFSATKQTLEAHQSKVSSLASASRKDHVLD

SEQ ID NO: 998 - protein, 404 aa, Homo sapiens
QHLLAPVFRTLSILTNQSNCWLCEHLDNAEQPELVFVPASASTWWTYSGQWMYERVWYPQAEVQNHSTSSYRKVTWHWEASMEAQGLSFAQVRLLEGNFSLCVENKNGSGPFLGNIPKQYCNQILWFDSTDGTFMPSIDVTNESRNDDDDTSVCLGTRQCSWFAGCTNRTWNSSAVPLIGLPNTQDYKWVDRNSGLTWSGNDTCLYSCQNQTKGLLYQLFRNLFCSYGLTEAHGKWRCADASITNDKGHDGHRTPTWWLTGSNLTLSVNNSGLFFLCGNGVYKGFPPKWSGRCGLGYLVPSLTRYLTLNASQITNLRSFIHKVTPHRCTQGDTDNPPLYCNPKDNSTIRALFPSLGTYDLEKAILNISKAMEQEFSATKQTLEAHQSKVSSLASASRKDHVLDI

SEQ ID NO: 999 - protein, 405 aa, Homo sapiens
QHLLAPVFRTLSILTNQSNCWLCEHLDNAEQPELVFVPASASTWWTYSGQWMYERVWYPQAEVQNHSTSSYRKVTWHWEASMEAQGLSFAQVRLLEGNFSLCVENKNGSGPFLGNIPKQYCNQILWFDSTDGTFMPSIDVTNESRNDDDDTSVCLGTRQCSWFAGCTNRTWNSSAVPLIGLPNTQDYKWVDRNSGLTWSGNDTCLYSCQNQTKGLLYQLFRNLFCSYGLTEAHGKWRCADASITNDKGHDGHRTPTWWLTGSNLTLSVNNSGLFFLCGNGVYKGFPPKWSGRCGLGYLVPSLTRYLTLNASQITNLRSFIHKVTPHRCTQGDTDNPPLYCNPKDNSTIRALFPSLGTYDLEKAILNISKAMEQEFSATKQTLEAHQSKVSSLASASRKDHVLDIP

SEQ ID NO: 1000 - protein, 406 aa, Homo sapiens
QHLLAPVFRTLSILTNQSNCWLCEHLDNAEQPELVFVPASASTWWTYSGQWMYERVWYPQAEVQNHSTSSYRKVTWHWEASMEAQGLSFAQVRLLEGNFSLCVENKNGSGPFLGNIPKQYCNQILWFDSTDGTFMPSIDVTNESRNDDDDTSVCLGTRQCSWFAGCTNRTWNSSAVPLIGLPNTQDYKWVDRNSGLTWSGNDTCLYSCQNQTKGLLYQLFRNLFCSYGLTEAHGKWRCADASITNDKGHDGHRTPTWWLTGSNLTLSVNNSGLFFLCGNGVYKGFPPKWSGRCGLGYLVPSLTRYLTLNASQITNLRSFIHKVTPHRCTQGDTDNPPLYCNPKDNSTIRALFPSLGTYDLEKAILNISKAMEQEFSATKQTLEAHQSKVSSLASASRKDHVLDIPT

SEQ ID NO: 1001 - protein, 407 aa, Homo sapiens
QHLLAPVFRTLSILTNQSNCWLCEHLDNAEQPELVFVPASASTWWTYSGQWMYERVWYPQAEVQNHSTSSYRKVTWHWEASMEAQGLSFAQVRLLEGNFSLCVENKNGSGPFLGNIPKQYCNQILWFDSTDGTFMPSIDVTNESRNDDDDTSVCLGTRQCSWFAGCTNRTWNSSAVPLIGLPNTQDYKWVDRNSGLTWSGNDTCLYSCQNQTKGLLYQLFRNLFCSYGLTEAHGKWRCADASITNDKGHDGHRTPTWWLTGSNLTLSVNNSGLFFLCGNGVYKGFPPKWSGRCGLGYLVPSLTRYLTLNASQITNLRSFIHKVTPHRCTQGDTDNPPLYCNPKDNSTIRALFPSLGTYDLEKAILNISKAMEQEFSATKQTLEAHQSKVSSLASASRKDHVLDIPTT

SEQ ID NO: 1002 - protein, 410 aa, Homo sapiens
QHLLAPVFRTLSILTNQSNCWLCEHLDNAEQPELVFVPASASTWWTYSGQWMYERVWYPQAEVQNHSTSSYRKVTWHWEASMEAQGLSFAQVRLLEGNFSLCVENKNGSGPFLGNIPKQYCNQILWFDSTDGTFMPSIDVTNESRNDDDDTSVCLGTRQCSWFAGCTNRTWNSSAVPLIGLPNTQDYKWVDRNSGLTWSGNDTCLYSCQNQTKGLLYQLFRNLFCSYGLTEAHGKWRCADASITNDKGHDGHRTPTWWLTGSNLTLSVNNSGLFFLCGNGVYKGFPPKWSGRCGLGYLVPSLTRYLTLNASQITNLRSFIHKVTPHRCTQGDTDNPPLYCNPKDNSTIRALFPSLGTYDLEKAILNISKAMEQEFSATKQTLEAHQSKVSSLASASRKDHVLDIPTTQRQ

SEQ ID NO: 1003 - protein, 411 aa, Homo sapiens
QHLLAPVFRTLSILTNQSNCWLCEHLDNAEQPELVFVPASASTWWTYSGQWMYERVWYPQAEVQNHSTSSYRKVTWHWEASMEAQGLSFAQVRLLEGNFSLCVENKNGSGPFLGNIPKQYCNQILWFDSTDGTFMPSIDVTNESRNDDDDTSVCLGTRQCSWFAGCTNRTWNSSAVPLIGLPNTQDYKWVDRNSGLTWSGNDTCLYSCQNQTKGLLYQLFRNLFCSYGLTEAHGKWRCADASITNDKGHDGHRTPTWWLTGSNLTLSVNNSGLFFLCGNGVYKGFPPKWSGRCGLGYLVPSLTRYLTLNASQITNLRSFIHKVTPHRCTQGDTDNPPLYCNPKDNSTIRALFPSLGTYDLEKAILNISKAMEQEFSATKQTLEAHQSKVSSLASASRKDHVLDIPTTQRQT

SEQ ID NO: 1004 - protein, 412 aa, Homo sapiens
QHLLAPVFRTLSILTNQSNCWLCEHLDNAEQPELVFVPASASTWWTYSGQWMYERVWYPQAEVQNHSTSSYRKVTWHWEASMEAQGLSFAQVRLLEGNFSLCVENKNGSGPFLGNIPKQYCNQILWFDSTDGTFMPSIDVTNESRNDDDDTSVCLGTRQCSWFAGCTNRTWNSSAVPLIGLPNTQDYKWVDRNSGLTWSGNDTCLYSCQNQTKGLLYQLFRNLFCSYGLTEAHGKWRCADASITNDKGHDGHRTPTWWLTGSNLTLSVNNSGLFFLCGNGVYKGFPPKWSGRCGLGYLVPSLTRYLTLNASQITNLRSFIHKVTPHRCTQGDTDNPPLYCNPKDNSTIRALFPSLGTYDLEKAILNISKAMEQEFSATKQTLEAHQSKVSSLASASRKDHVLDIPTTQRQTA

SEQ ID NO: 1005 - protein, 413 aa, Homo sapiens
QHLLAPVFRTLSILTNQSNCWLCEHLDNAEQPELVFVPASASTWWTYSGQWMYERVWYPQAEVQNHSTSSYRKVTWHWEASMEAQGLSFAQVRLLEGNFSLCVENKNGSGPFLGNIPKQYCNQILWFDSTDGTFMPSIDVTNESRNDDDDTSVCLGTRQCSWFAGCTNRTWNSSAVPLIGLPNTQDYKWVDRNSGLTWSGNDTCLYSCQNQTKGLLYQLFRNLFCSYGLTEAHGKWRCADASITNDKGHDGHRTPTWWLTGSNLTLSVNNSGLFFLCGNGVYKGFPPKWSGRCGLGYLVPSLTRYLTLNASQITNLRSFIHKVTPHRCTQGDTDNPPLYCNPKDNSTIRALFPSLGTYDLEKAILNISKAMEQEFSATKQTLEAHQSKVSSLASASRKDHVLDIPTTQRQTAC

SEQ ID NO: 1006 - protein, 414 aa, Homo sapiens
QHLLAPVFRTLSILTNQSNCWLCEHLDNAEQPELVFVPASASTWWTYSGQWMYERVWYPQAEVQNHSTSSYRKVTWHWEASMEAQGLSFAQVRLLEGNFSLCVENKNGSGPFLGNIPKQYCNQILWFDSTDGTFMPSIDVTNESRNDDDDTSVCLGTRQCSWFAGCTNRTWNSSAVPLIGLPNTQDYKWVDRNSGLTWSGNDTCLYSCQNQTKGLLYQLFRNLFCSYGLTEAHGKWRCADASITNDKGHDGHRTPTWWLTGSNLTLSVNNSGLFFLCGNGVYKGFPPKWSGRCGLGYLVPSLTRYLTLNASQITNLRSFIHKVTPHRCTQGDTDNPPLYCNPKDNSTIRALFPSLGTYDLEKAILNISKAMEQEFSATKQTLEAHQSKVSSLASASRKDHVLDIPTTQRQTACG

SEQ ID NO: 1007 - protein, 415 aa, Homo sapiens
QHLLAPVFRTLSILTNQSNCWLCEHLDNAEQPELVFVPASASTWWTYSGQWMYERVWYPQAEVQNHSTSSYRKVTWHWEASMEAQGLSFAQVRLLEGNFSLCVENKNGSGPFLGNIPKQYCNQILWFDSTDGTFMPSIDVTNESRNDDDDTSVCLGTRQCSWFAGCTNRTWNSSAVPLIGLPNTQDYKWVDRNSGLTWSGNDTCLYSCQNQTKGLLYQLFRNLFCSYGLTEAHGKWRCADASITNDKGHDGHRTPTWWLTGSNLTLSVNNSGLFFLCGNGVYKGFPPKWSGRCGLGYLVPSLTRYLTLNASQITNLRSFIHKVTPHRCTQGDTDNPPLYCNPKDNSTIRALFPSLGTYDLEKAILNISKAMEQEFSATKQTLEAHQSKVSSLASASRKDHVLDIPTTQRQTACGT

SEQ ID NO: 1008 - protein, 416 aa, Homo sapiens
QHLLAPVFRTLSILTNQSNCWLCEHLDNAEQPELVFVPASASTWWTYSGQWMYERVWYPQAEVQNHSTSSYRKVTWHWEASMEAQGLSFAQVRLLEGNFSLCVENKNGSGPFLGNIPKQYCNQILWFDSTDGTFMPSIDVTNESRNDDDDTSVCLGTRQCSWFAGCTNRTWNSSAVPLIGLPNTQDYKWVDRNSGLTWSGNDTCLYSCQNQTKGLLYQLFRNLFCSYGLTEAHGKWRCADASITNDKGHDGHRTPTWWLTGSNLTLSVNNSGLFFLCGNGVYKGFPPKWSGRCGLGYLVPSLTRYLTLNASQITNLRSFIHKVTPHRCTQGDTDNPPLYCNPKDNSTIRALFPSLGTYDLEKAILNISKAMEQEFSATKQTLEAHQSKVSSLASASRKDHVLDIPTTQRQTACGTV

SEQ ID NO: 1009 - protein, 417 aa, Homo sapiens
QHLLAPVFRTLSILTNQSNCWLCEHLDNAEQPELVFVPASASTWWTYSGQWMYERVWYPQAEVQNHSTSSYRKVTWHWEASMEAQGLSFAQVRLLEGNFSLCVENKNGSGPFLGNIPKQYCNQILWFDSTDGTFMPSIDVTNESRNDDDDTSVCLGTRQCSWFAGCTNRTWNSSAVPLIGLPNTQDYKWVDRNSGLTWSGNDTCLYSCQNQTKGLLYQLFRNLFCSYGLTEAHGKWRCADASITNDKGHDGHRTPTWWLTGSNLTLSVNNSGLFFLCGNGVYKGFPPKWSGRCGLGYLVPSLTRYLTLNASQITNLRSFIHKVTPHRCTQGDTDNPPLYCNPKDNSTIRALFPSLGTYDLEKAILNISKAMEQEFSATKQTLEAHQSKVSSLASASRKDHVLDIPTTQRQTACGTVG

SEQ ID NO: 1010 - protein, 418 aa, Homo sapiens
QHLLAPVFRTLSILTNQSNCWLCEHLDNAEQPELVFVPASASTWWTYSGQWMYERVWYPQAEVQNHSTSSYRKVTWHWEASMEAQGLSFAQVRLLEGNFSLCVENKNGSGPFLGNIPKQYCNQILWFDSTDGTFMPSIDVTNESRNDDDDTSVCLGTRQCSWFAGCTNRTWNSSAVPLIGLPNTQDYKWVDRNSGLTWSGNDTCLYSCQNQTKGLLYQLFRNLFCSYGLTEAHGKWRCADASITNDKGHDGHRTPTWWLTGSNLTLSVNNSGLFFLCGNGVYKGFPPKWSGRCGLGYLVPSLTRYLTLNASQITNLRSFIHKVTPHRCTQGDTDNPPLYCNPKDNSTIRALFPSLGTYDLEKAILNISKAMEQEFSATKQTLEAHQSKVSSLASASRKDHVLDIPTTQRQTACGTVGK

SEQ ID NO: 1011 - protein, 419 aa, Homo sapiens
QHLLAPVFRTLSILTNQSNCWLCEHLDNAEQPELVFVPASASTWWTYSGQWMYERVWYPQAEVQNHSTSSYRKVTWHWEASMEAQGLSFAQVRLLEGNFSLCVENKNGSGPFLGNIPKQYCNQILWFDSTDGTFMPSIDVTNESRNDDDDTSVCLGTRQCSWFAGCTNRTWNSSAVPLIGLPNTQDYKWVDRNSGLTWSGNDTCLYSCQNQTKGLLYQLFRNLFCSYGLTEAHGKWRCADASITNDKGHDGHRTPTWWLTGSNLTLSVNNSGLFFLCGNGVYKGFPPKWSGRCGLGYLVPSLTRYLTLNASQITNLRSFIHKVTPHRCTQGDTDNPPLYCNPKDNSTIRALFPSLGTYDLEKAILNISKAMEQEFSATKQTLEAHQSKVSSLASASRKDHVLDIPTTQRQTACGTVGKQ

SEQ ID NO: 1012 - protein, 420 aa, Homo sapiens
QHLLAPVFRTLSILTNQSNCWLCEHLDNAEQPELVFVPASASTWWTYSGQWMYERVWYPQAEVQNHSTSSYRKVTWHWEASMEAQGLSFAQVRLLEGNFSLCVENKNGSGPFLGNIPKQYCNQILWFDSTDGTFMPSIDVTNESRNDDDDTSVCLGTRQCSWFAGCTNRTWNSSAVPLIGLPNTQDYKWVDRNSGLTWSGNDTCLYSCQNQTKGLLYQLFRNLFCSYGLTEAHGKWRCADASITNDKGHDGHRTPTWWLTGSNLTLSVNNSGLFFLCGNGVYKGFPPKWSGRCGLGYLVPSLTRYLTLNASQITNLRSFIHKVTPHRCTQGDTDNPPLYCNPKDNSTIRALFPSLGTYDLEKAILNISKAMEQEFSATKQTLEAHQSKVSSLASASRKDHVLDIPTTQRQTACGTVGKQC

SEQ ID NO: 1013 - protein, 421 aa, Homo sapiens
QHLLAPVFRTLSILTNQSNCWLCEHLDNAEQPELVFVPASASTWWTYSGQWMYERVWYPQAEVQNHSTSSYRKVTWHWEASMEAQGLSFAQVRLLEGNFSLCVENKNGSGPFLGNIPKQYCNQILWFDSTDGTFMPSIDVTNESRNDDDDTSVCLGTRQCSWFAGCTNRTWNSSAVPLIGLPNTQDYKWVDRNSGLTWSGNDTCLYSCQNQTKGLLYQLFRNLFCSYGLTEAHGKWRCADASITNDKGHDGHRTPTWWLTGSNLTLSVNNSGLFFLCGNGVYKGFPPKWSGRCGLGYLVPSLTRYLTLNASQITNLRSFIHKVTPHRCTQGDTDNPPLYCNPKDNSTIRALFPSLGTYDLEKAILNISKAMEQEFSATKQTLEAHQSKVSSLASASRKDHVLDIPTTQRQTACGTVGKQCC

SEQ ID NO: 1014 - protein, 422 aa, Homo sapiens
QHLLAPVFRTLSILTNQSNCWLCEHLDNAEQPELVFVPASASTWWTYSGQWMYERVWYPQAEVQNHSTSSYRKVTWHWEASMEAQGLSFAQVRLLEGNFSLCVENKNGSGPFLGNIPKQYCNQILWFDSTDGTFMPSIDVTNESRNDDDDTSVCLGTRQCSWFAGCTNRTWNSSAVPLIGLPNTQDYKWVDRNSGLTWSGNDTCLYSCQNQTKGLLYQLFRNLFCSYGLTEAHGKWRCADASITNDKGHDGHRTPTWWLTGSNLTLSVNNSGLFFLCGNGVYKGFPPKWSGRCGLGYLVPSLTRYLTLNASQITNLRSFIHKVTPHRCTQGDTDNPPLYCNPKDNSTIRALFPSLGTYDLEKAILNISKAMEQEFSATKQTLEAHQSKVSSLASASRKDHVLDIPTTQRQTACGTVGKQCCL

SEQ ID NO: 1015 - protein, 423 aa, Homo sapiens
QHLLAPVFRTLSILTNQSNCWLCEHLDNAEQPELVFVPASASTWWTYSGQWMYERVWYPQAEVQNHSTSSYRKVTWHWEASMEAQGLSFAQVRLLEGNFSLCVENKNGSGPFLGNIPKQYCNQILWFDSTDGTFMPSIDVTNESRNDDDDTSVCLGTRQCSWFAGCTNRTWNSSAVPLIGLPNTQDYKWVDRNSGLTWSGNDTCLYSCQNQTKGLLYQLFRNLFCSYGLTEAHGKWRCADASITNDKGHDGHRTPTWWLTGSNLTLSVNNSGLFFLCGNGVYKGFPPKWSGRCGLGYLVPSLTRYLTLNASQITNLRSFIHKVTPHRCTQGDTDNPPLYCNPKDNSTIRALFPSLGTYDLEKAILNISKAMEQEFSATKQTLEAHQSKVSSLASASRKDHVLDIPTTQRQTACGTVGKQCCLY

SEQ ID NO: 1016 - protein, 424 aa, Homo sapiens
QHLLAPVFRTLSILTNQSNCWLCEHLDNAEQPELVFVPASASTWWTYSGQWMYERVWYPQAEVQNHSTSSYRKVTWHWEASMEAQGLSFAQVRLLEGNFSLCVENKNGSGPFLGNIPKQYCNQILWFDSTDGTFMPSIDVTNESRNDDDDTSVCLGTRQCSWFAGCTNRTWNSSAVPLIGLPNTQDYKWVDRNSGLTWSGNDTCLYSCQNQTKGLLYQLFRNLFCSYGLTEAHGKWRCADASITNDKGHDGHRTPTWWLTGSNLTLSVNNSGLFFLCGNGVYKGFPPKWSGRCGLGYLVPSLTRYLTLNASQITNLRSFIHKVTPHRCTQGDTDNPPLYCNPKDNSTIRALFPSLGTYDLEKAILNISKAMEQEFSATKQTLEAHQSKVSSLASASRKDHVLDIPTTQRQTACGTVGKQCCLYI

SEQ ID NO: 1017 - protein, 425 aa, Homo sapiens
QHLLAPVFRTLSILTNQSNCWLCEHLDNAEQPELVFVPASASTWWTYSGQWMYERVWYPQAEVQNHSTSSYRKVTWHWEASMEAQGLSFAQVRLLEGNFSLCVENKNGSGPFLGNIPKQYCNQILWFDSTDGTFMPSIDVTNESRNDDDDTSVCLGTRQCSWFAGCTNRTWNSSAVPLIGLPNTQDYKWVDRNSGLTWSGNDTCLYSCQNQTKGLLYQLFRNLFCSYGLTEAHGKWRCADASITNDKGHDGHRTPTWWLTGSNLTLSVNNSGLFFLCGNGVYKGFPPKWSGRCGLGYLVPSLTRYLTLNASQITNLRSFIHKVTPHRCTQGDTDNPPLYCNPKDNSTIRALFPSLGTYDLEKAILNISKAMEQEFSATKQTLEAHQSKVSSLASASRKDHVLDIPTTQRQTACGTVGKQCCLYIN

SEQ ID NO: 1018 - protein, 396 aa, Homo sapiens
HLLAPVFRTLSILTNQSNCWLCEHLDNAEQPELVFVPASASTWWTYSGQWMYERVWYPQAEVQNHSTSSYRKVTWHWEASMEAQGLSFAQVRLLEGNFSLCVENKNGSGPFLGNIPKQYCNQILWFDSTDGTFMPSIDVTNESRNDDDDTSVCLGTRQCSWFAGCTNRTWNSSAVPLIGLPNTQDYKWVDRNSGLTWSGNDTCLYSCQNQTKGLLYQLFRNLFCSYGLTEAHGKWRCADASITNDKGHDGHRTPTWWLTGSNLTLSVNNSGLFFLCGNGVYKGFPPKWSGRCGLGYLVPSLTRYLTLNASQITNLRSFIHKVTPHRCTQGDTDNPPLYCNPKDNSTIRALFPSLGTYDLEKAILNISKAMEQEFSATKQTLEAHQSKVSSLASASR

SEQ ID NO: 1019 - protein, 397 aa, Homo sapiens
HLLAPVFRTLSILTNQSNCWLCEHLDNAEQPELVFVPASASTWWTYSGQWMYERVWYPQAEVQNHSTSSYRKVTWHWEASMEAQGLSFAQVRLLEGNFSLCVENKNGSGPFLGNIPKQYCNQILWFDSTDGTFMPSIDVTNESRNDDDDTSVCLGTRQCSWFAGCTNRTWNSSAVPLIGLPNTQDYKWVDRNSGLTWSGNDTCLYSCQNQTKGLLYQLFRNLFCSYGLTEAHGKWRCADASITNDKGHDGHRTPTWWLTGSNLTLSVNNSGLFFLCGNGVYKGFPPKWSGRCGLGYLVPSLTRYLTLNASQITNLRSFIHKVTPHRCTQGDTDNPPLYCNPKDNSTIRALFPSLGTYDLEKAILNISKAMEQEFSATKQTLEAHQSKVSSLASASRK

SEQ ID NO: 1020 - protein, 398 aa, Homo sapiens
HLLAPVFRTLSILTNQSNCWLCEHLDNAEQPELVFVPASASTWWTYSGQWMYERVWYPQAEVQNHSTSSYRKVTWHWEASMEAQGLSFAQVRLLEGNFSLCVENKNGSGPFLGNIPKQYCNQILWFDSTDGTFMPSIDVTNESRNDDDDTSVCLGTRQCSWFAGCTNRTWNSSAVPLIGLPNTQDYKWVDRNSGLTWSGNDTCLYSCQNQTKGLLYQLFRNLFCSYGLTEAHGKWRCADASITNDKGHDGHRTPTWWLTGSNLTLSVNNSGLFFLCGNGVYKGFPPKWSGRCGLGYLVPSLTRYLTLNASQITNLRSFIHKVTPHRCTQGDTDNPPLYCNPKDNSTIRALFPSLGTYDLEKAILNISKAMEQEFSATKQTLEAHQSKVSSLASASRKD

SEQ ID NO: 1021 - protein, 399 aa, Homo sapiens
HLLAPVFRTLSILTNQSNCWLCEHLDNAEQPELVFVPASASTWWTYSGQWMYERVWYPQAEVQNHSTSSYRKVTWHWEASMEAQGLSFAQVRLLEGNFSLCVENKNGSGPFLGNIPKQYCNQILWFDSTDGTFMPSIDVTNESRNDDDDTSVCLGTRQCSWFAGCTNRTWNSSAVPLIGLPNTQDYKWVDRNSGLTWSGNDTCLYSCQNQTKGLLYQLFRNLFCSYGLTEAHGKWRCADASITNDKGHDGHRTPTWWLTGSNLTLSVNNSGLFFLCGNGVYKGFPPKWSGRCGLGYLVPSLTRYLTLNASQITNLRSFIHKVTPHRCTQGDTDNPPLYCNPKDNSTIRALFPSLGTYDLEKAILNISKAMEQEFSATKQTLEAHQSKVSSLASASRKDH

SEQ ID NO: 1022 - protein, 400 aa, Homo sapiens
HLLAPVFRTLSILTNQSNCWLCEHLDNAEQPELVFVPASASTWWTYSGQWMYERVWYPQAEVQNHSTSSYRKVTWHWEASMEAQGLSFAQVRLLEGNFSLCVENKNGSGPFLGNIPKQYCNQILWFDSTDGTFMPSIDVTNESRNDDDDTSVCLGTRQCSWFAGCTNRTWNSSAVPLIGLPNTQDYKWVDRNSGLTWSGNDTCLYSCQNQTKGLLYQLFRNLFCSYGLTEAHGKWRCADASITNDKGHDGHRTPTWWLTGSNLTLSVNNSGLFFLCGNGVYKGFPPKWSGRCGLGYLVPSLTRYLTLNASQITNLRSFIHKVTPHRCTQGDTDNPPLYCNPKDNSTIRALFPSLGTYDLEKAILNISKAMEQEFSATKQTLEAHQSKVSSLASASRKDHV

SEQ ID NO: 1023 - protein, 401 aa, Homo sapiens
HLLAPVFRTLSILTNQSNCWLCEHLDNAEQPELVFVPASASTWWTYSGQWMYERVWYPQAEVQNHSTSSYRKVTWHWEASMEAQGLSFAQVRLLEGNFSLCVENKNGSGPFLGNIPKQYCNQILWFDSTDGTFMPSIDVTNESRNDDDDTSVCLGTRQCSWFAGCTNRTWNSSAVPLIGLPNTQDYKWVDRNSGLTWSGNDTCLYSCQNQTKGLLYQLFRNLFCSYGLTEAHGKWRCADASITNDKGHDGHRTPTWWLTGSNLTLSVNNSGLFFLCGNGVYKGFPPKWSGRCGLGYLVPSLTRYLTLNASQITNLRSFIHKVTPHRCTQGDTDNPPLYCNPKDNSTIRALFPSLGTYDLEKAILNISKAMEQEFSATKQTLEAHQSKVSSLASASRKDHVL

SEQ ID NO: 1024 - protein, 402 aa, Homo sapiens
HLLAPVFRTLSILTNQSNCWLCEHLDNAEQPELVFVPASASTWWTYSGQWMYERVWYPQAEVQNHSTSSYRKVTWHWEASMEAQGLSFAQVRLLEGNFSLCVENKNGSGPFLGNIPKQYCNQILWFDSTDGTFMPSIDVTNESRNDDDDTSVCLGTRQCSWFAGCTNRTWNSSAVPLIGLPNTQDYKWVDRNSGLTWSGNDTCLYSCQNQTKGLLYQLFRNLFCSYGLTEAHGKWRCADASITNDKGHDGHRTPTWWLTGSNLTLSVNNSGLFFLCGNGVYKGFPPKWSGRCGLGYLVPSLTRYLTLNASQITNLRSFIHKVTPHRCTQGDTDNPPLYCNPKDNSTIRALFPSLGTYDLEKAILNISKAMEQEFSATKQTLEAHQSKVSSLASASRKDHVLD

SEQ ID NO: 1025 - protein, 403 aa, Homo sapiens
HLLAPVFRTLSILTNQSNCWLCEHLDNAEQPELVFVPASASTWWTYSGQWMYERVWYPQAEVQNHSTSSYRKVTWHWEASMEAQGLSFAQVRLLEGNFSLCVENKNGSGPFLGNIPKQYCNQILWFDSTDGTFMPSIDVTNESRNDDDDTSVCLGTRQCSWFAGCTNRTWNSSAVPLIGLPNTQDYKWVDRNSGLTWSGNDTCLYSCQNQTKGLLYQLFRNLFCSYGLTEAHGKWRCADASITNDKGHDGHRTPTWWLTGSNLTLSVNNSGLFFLCGNGVYKGFPPKWSGRCGLGYLVPSLTRYLTLNASQITNLRSFIHKVTPHRCTQGDTDNPPLYCNPKDNSTIRALFPSLGTYDLEKAILNISKAMEQEFSATKQTLEAHQSKVSSLASASRKDHVLDI

SEQ ID NO: 1026 - protein, 404 aa, Homo sapiens
HLLAPVFRTLSILTNQSNCWLCEHLDNAEQPELVFVPASASTWWTYSGQWMYERVWYPQAEVQNHSTSSYRKVTWHWEASMEAQGLSFAQVRLLEGNFSLCVENKNGSGPFLGNIPKQYCNQILWFDSTDGTFMPSIDVTNESRNDDDDTSVCLGTRQCSWFAGCTNRTWNSSAVPLIGLPNTQDYKWVDRNSGLTWSGNDTCLYSCQNQTKGLLYQLFRNLFCSYGLTEAHGKWRCADASITNDKGHDGHRTPTWWLTGSNLTLSVNNSGLFFLCGNGVYKGFPPKWSGRCGLGYLVPSLTRYLTLNASQITNLRSFIHKVTPHRCTQGDTDNPPLYCNPKDNSTIRALFPSLGTYDLEKAILNISKAMEQEFSATKQTLEAHQSKVSSLASASRKDHVLDIP

SEQ ID NO: 1027 - protein, 405 aa, Homo sapiens
HLLAPVFRTLSILTNQSNCWLCEHLDNAEQPELVFVPASASTWWTYSGQWMYERVWYPQAEVQNHSTSSYRKVTWHWEASMEAQGLSFAQVRLLEGNFSLCVENKNGSGPFLGNIPKQYCNQILWFDSTDGTFMPSIDVTNESRNDDDDTSVCLGTRQCSWFAGCTNRTWNSSAVPLIGLPNTQDYKWVDRNSGLTWSGNDTCLYSCQNQTKGLLYQLFRNLFCSYGLTEAHGKWRCADASITNDKGHDGHRTPTWWLTGSNLTLSVNNSGLFFLCGNGVYKGFPPKWSGRCGLGYLVPSLTRYLTLNASQITNLRSFIHKVTPHRCTQGDTDNPPLYCNPKDNSTIRALFPSLGTYDLEKAILNISKAMEQEFSATKQTLEAHQSKVSSLASASRKDHVLDIPT

SEQ ID NO: 1028 - protein, 406 aa, Homo sapiens
HLLAPVFRTLSILTNQSNCWLCEHLDNAEQPELVFVPASASTWWTYSGQWMYERVWYPQAEVQNHSTSSYRKVTWHWEASMEAQGLSFAQVRLLEGNFSLCVENKNGSGPFLGNIPKQYCNQILWFDSTDGTFMPSIDVTNESRNDDDDTSVCLGTRQCSWFAGCTNRTWNSSAVPLIGLPNTQDYKWVDRNSGLTWSGNDTCLYSCQNQTKGLLYQLFRNLFCSYGLTEAHGKWRCADASITNDKGHDGHRTPTWWLTGSNLTLSVNNSGLFFLCGNGVYKGFPPKWSGRCGLGYLVPSLTRYLTLNASQITNLRSFIHKVTPHRCTQGDTDNPPLYCNPKDNSTIRALFPSLGTYDLEKAILNISKAMEQEFSATKQTLEAHQSKVSSLASASRKDHVLDIPTT

SEQ ID NO: 1029 - protein, 409 aa, Homo sapiens
HLLAPVFRTLSILTNQSNCWLCEHLDNAEQPELVFVPASASTWWTYSGQWMYERVWYPQAEVQNHSTSSYRKVTWHWEASMEAQGLSFAQVRLLEGNFSLCVENKNGSGPFLGNIPKQYCNQILWFDSTDGTFMPSIDVTNESRNDDDDTSVCLGTRQCSWFAGCTNRTWNSSAVPLIGLPNTQDYKWVDRNSGLTWSGNDTCLYSCQNQTKGLLYQLFRNLFCSYGLTEAHGKWRCADASITNDKGHDGHRTPTWWLTGSNLTLSVNNSGLFFLCGNGVYKGFPPKWSGRCGLGYLVPSLTRYLTLNASQITNLRSFIHKVTPHRCTQGDTDNPPLYCNPKDNSTIRALFPSLGTYDLEKAILNISKAMEQEFSATKQTLEAHQSKVSSLASASRKDHVLDIPTTQRQ

SEQ ID NO: 1030 - protein, 410 aa, Homo sapiens
HLLAPVFRTLSILTNQSNCWLCEHLDNAEQPELVFVPASASTWWTYSGQWMYERVWYPQAEVQNHSTSSYRKVTWHWEASMEAQGLSFAQVRLLEGNFSLCVENKNGSGPFLGNIPKQYCNQILWFDSTDGTFMPSIDVTNESRNDDDDTSVCLGTRQCSWFAGCTNRTWNSSAVPLIGLPNTQDYKWVDRNSGLTWSGNDTCLYSCQNQTKGLLYQLFRNLFCSYGLTEAHGKWRCADASITNDKGHDGHRTPTWWLTGSNLTLSVNNSGLFFLCGNGVYKGFPPKWSGRCGLGYLVPSLTRYLTLNASQITNLRSFIHKVTPHRCTQGDTDNPPLYCNPKDNSTIRALFPSLGTYDLEKAILNISKAMEQEFSATKQTLEAHQSKVSSLASASRKDHVLDIPTTQRQT

SEQ ID NO: 1031 - protein, 411 aa, Homo sapiens
HLLAPVFRTLSILTNQSNCWLCEHLDNAEQPELVFVPASASTWWTYSGQWMYERVWYPQAEVQNHSTSSYRKVTWHWEASMEAQGLSFAQVRLLEGNFSLCVENKNGSGPFLGNIPKQYCNQILWFDSTDGTFMPSIDVTNESRNDDDDTSVCLGTRQCSWFAGCTNRTWNSSAVPLIGLPNTQDYKWVDRNSGLTWSGNDTCLYSCQNQTKGLLYQLFRNLFCSYGLTEAHGKWRCADASITNDKGHDGHRTPTWWLTGSNLTLSVNNSGLFFLCGNGVYKGFPPKWSGRCGLGYLVPSLTRYLTLNASQITNLRSFIHKVTPHRCTQGDTDNPPLYCNPKDNSTIRALFPSLGTYDLEKAILNISKAMEQEFSATKQTLEAHQSKVSSLASASRKDHVLDIPTTQRQTA

SEQ ID NO: 1032 - protein, 413 aa, Homo sapiens; identical to SEQ ID NO: 1005

SEQ ID NO: 1033 - protein, 413 aa, Homo sapiens
HLLAPVFRTLSILTNQSNCWLCEHLDNAEQPELVFVPASASTWWTYSGQWMYERVWYPQAEVQNHSTSSYRKVTWHWEASMEAQGLSFAQVRLLEGNFSLCVENKNGSGPFLGNIPKQYCNQILWFDSTDGTFMPSIDVTNESRNDDDDTSVCLGTRQCSWFAGCTNRTWNSSAVPLIGLPNTQDYKWVDRNSGLTWSGNDTCLYSCQNQTKGLLYQLFRNLFCSYGLTEAHGKWRCADASITNDKGHDGHRTPTWWLTGSNLTLSVNNSGLFFLCGNGVYKGFPPKWSGRCGLGYLVPSLTRYLTLNASQITNLRSFIHKVTPHRCTQGDTDNPPLYCNPKDNSTIRALFPSLGTYDLEKAILNISKAMEQEFSATKQTLEAHQSKVSSLASASRKDHVLDIPTTQRQTACG

SEQ ID NO: 1034 - protein, 414 aa, Homo sapiens
HLLAPVFRTLSILTNQSNCWLCEHLDNAEQPELVFVPASASTWWTYSGQWMYERVWYPQAEVQNHSTSSYRKVTWHWEASMEAQGLSFAQVRLLEGNFSLCVENKNGSGPFLGNIPKQYCNQILWFDSTDGTFMPSIDVTNESRNDDDDTSVCLGTRQCSWFAGCTNRTWNSSAVPLIGLPNTQDYKWVDRNSGLTWSGNDTCLYSCQNQTKGLLYQLFRNLFCSYGLTEAHGKWRCADASITNDKGHDGHRTPTWWLTGSNLTLSVNNSGLFFLCGNGVYKGFPPKWSGRCGLGYLVPSLTRYLTLNASQITNLRSFIHKVTPHRCTQGDTDNPPLYCNPKDNSTIRALFPSLGTYDLEKAILNISKAMEQEFSATKQTLEAHQSKVSSLASASRKDHVLDIPTTQRQTACGT

SEQ ID NO: 1035 - protein, 415 aa, Homo sapiens
HLLAPVFRTLSILTNQSNCWLCEHLDNAEQPELVFVPASASTWWTYSGQWMYERVWYPQAEVQNHSTSSYRKVTWHWEASMEAQGLSFAQVRLLEGNFSLCVENKNGSGPFLGNIPKQYCNQILWFDSTDGTFMPSIDVTNESRNDDDDTSVCLGTRQCSWFAGCTNRTWNSSAVPLIGLPNTQDYKWVDRNSGLTWSGNDTCLYSCQNQTKGLLYQLFRNLFCSYGLTEAHGKWRCADASITNDKGHDGHRTPTWWLTGSNLTLSVNNSGLFFLCGNGVYKGFPPKWSGRCGLGYLVPSLTRYLTLNASQITNLRSFIHKVTPHRCTQGDTDNPPLYCNPKDNSTIRALFPSLGTYDLEKAILNISKAMEQEFSATKQTLEAHQSKVSSLASASRKDHVLDIPTTQRQTACGTV

SEQ ID NO: 1036 - protein, 416 aa, Homo sapiens
HLLAPVFRTLSILTNQSNCWLCEHLDNAEQPELVFVPASASTWWTYSGQWMYERVWYPQAEVQNHSTSSYRKVTWHWEASMEAQGLSFAQVRLLEGNFSLCVENKNGSGPFLGNIPKQYCNQILWFDSTDGTFMPSIDVTNESRNDDDDTSVCLGTRQCSWFAGCTNRTWNSSAVPLIGLPNTQDYKWVDRNSGLTWSGNDTCLYSCQNQTKGLLYQLFRNLFCSYGLTEAHGKWRCADASITNDKGHDGHRTPTWWLTGSNLTLSVNNSGLFFLCGNGVYKGFPPKWSGRCGLGYLVPSLTRYLTLNASQITNLRSFIHKVTPHRCTQGDTDNPPLYCNPKDNSTIRALFPSLGTYDLEKAILNISKAMEQEFSATKQTLEAHQSKVSSLASASRKDHVLDIPTTQRQTACGTVG

SEQ ID NO: 1037 - protein, 417 aa, Homo sapiens
HLLAPVFRTLSILTNQSNCWLCEHLDNAEQPELVFVPASASTWWTYSGQWMYERVWYPQAEVQNHSTSSYRKVTWHWEASMEAQGLSFAQVRLLEGNFSLCVENKNGSGPFLGNIPKQYCNQILWFDSTDGTFMPSIDVTNESRNDDDDTSVCLGTRQCSWFAGCTNRTWNSSAVPLIGLPNTQDYKWVDRNSGLTWSGNDTCLYSCQNQTKGLLYQLFRNLFCSYGLTEAHGKWRCADASITNDKGHDGHRTPTWWLTGSNLTLSVNNSGLFFLCGNGVYKGFPPKWSGRCGLGYLVPSLTRYLTLNASQITNLRSFIHKVTPHRCTQGDTDNPPLYCNPKDNSTIRALFPSLGTYDLEKAILNISKAMEQEFSATKQTLEAHQSKVSSLASASRKDHVLDIPTTQRQTACGTVGK

SEQ ID NO: 1038 - protein, 418 aa, Homo sapiens
HLLAPVFRTLSILTNQSNCWLCEHLDNAEQPELVFVPASASTWWTYSGQWMYERVWYPQAEVQNHSTSSYRKVTWHWEASMEAQGLSFAQVRLLEGNFSLCVENKNGSGPFLGNIPKQYCNQILWFDSTDGTFMPSIDVTNESRNDDDDTSVCLGTRQCSWFAGCTNRTWNSSAVPLIGLPNTQDYKWVDRNSGLTWSGNDTCLYSCQNQTKGLLYQLFRNLFCSYGLTEAHGKWRCADASITNDKGHDGHRTPTWWLTGSNLTLSVNNSGLFFLCGNGVYKGFPPKWSGRCGLGYLVPSLTRYLTLNASQITNLRSFIHKVTPHRCTQGDTDNPPLYCNPKDNSTIRALFPSLGTYDLEKAILNISKAMEQEFSATKQTLEAHQSKVSSLASASRKDHVLDIPTTQRQTACGTVGKQ

SEQ ID NO: 1039 - protein, 419 aa, Homo sapiens
HLLAPVFRTLSILTNQSNCWLCEHLDNAEQPELVFVPASASTWWTYSGQWMYERVWYPQAEVQNHSTSSYRKVTWHWEASMEAQGLSFAQVRLLEGNFSLCVENKNGSGPFLGNIPKQYCNQILWFDSTDGTFMPSIDVTNESRNDDDDTSVCLGTRQCSWFAGCTNRTWNSSAVPLIGLPNTQDYKWVDRNSGLTWSGNDTCLYSCQNQTKGLLYQLFRNLFCSYGLTEAHGKWRCADASITNDKGHDGHRTPTWWLTGSNLTLSVNNSGLFFLCGNGVYKGFPPKWSGRCGLGYLVPSLTRYLTLNASQITNLRSFIHKVTPHRCTQGDTDNPPLYCNPKDNSTIRALFPSLGTYDLEKAILNISKAMEQEFSATKQTLEAHQSKVSSLASASRKDHVLDIPTTQRQTACGTVGKQC

SEQ ID NO: 1040 - protein, 420 aa, Homo sapiens
HLLAPVFRTLSILTNQSNCWLCEHLDNAEQPELVFVPASASTWWTYSGQWMYERVWYPQAEVQNHSTSSYRKVTWHWEASMEAQGLSFAQVRLLEGNFSLCVENKNGSGPFLGNIPKQYCNQILWFDSTDGTFMPSIDVTNESRNDDDDTSVCLGTRQCSWFAGCTNRTWNSSAVPLIGLPNTQDYKWVDRNSGLTWSGNDTCLYSCQNQTKGLLYQLFRNLFCSYGLTEAHGKWRCADASITNDKGHDGHRTPTWWLTGSNLTLSVNNSGLFFLCGNGVYKGFPPKWSGRCGLGYLVPSLTRYLTLNASQITNLRSFIHKVTPHRCTQGDTDNPPLYCNPKDNSTIRALFPSLGTYDLEKAILNISKAMEQEFSATKQTLEAHQSKVSSLASASRKDHVLDIPTTQRQTACGTVGKQCC

SEQ ID NO: 1041 - protein, 421 aa, Homo sapiens
HLLAPVFRTLSILTNQSNCWLCEHLDNAEQPELVFVPASASTWWTYSGQWMYERVWYPQAEVQNHSTSSYRKVTWHWEASMEAQGLSFAQVRLLEGNFSLCVENKNGSGPFLGNIPKQYCNQILWFDSTDGTFMPSIDVTNESRNDDDDTSVCLGTRQCSWFAGCTNRTWNSSAVPLIGLPNTQDYKWVDRNSGLTWSGNDTCLYSCQNQTKGLLYQLFRNLFCSYGLTEAHGKWRCADASITNDKGHDGHRTPTWWLTGSNLTLSVNNSGLFFLCGNGVYKGFPPKWSGRCGLGYLVPSLTRYLTLNASQITNLRSFIHKVTPHRCTQGDTDNPPLYCNPKDNSTIRALFPSLGTYDLEKAILNISKAMEQEFSATKQTLEAHQSKVSSLASASRKDHVLDIPTTQRQTACGTVGKQCCL

SEQ ID NO: 1042 - protein, 422 aa, Homo sapiens
HLLAPVFRTLSILTNQSNCWLCEHLDNAEQPELVFVPASASTWWTYSGQWMYERVWYPQAEVQNHSTSSYRKVTWHWEASMEAQGLSFAQVRLLEGNFSLCVENKNGSGPFLGNIPKQYCNQILWFDSTDGTFMPSIDVTNESRNDDDDTSVCLGTRQCSWFAGCTNRTWNSSAVPLIGLPNTQDYKWVDRNSGLTWSGNDTCLYSCQNQTKGLLYQLFRNLFCSYGLTEAHGKWRCADASITNDKGHDGHRTPTWWLTGSNLTLSVNNSGLFFLCGNGVYKGFPPKWSGRCGLGYLVPSLTRYLTLNASQITNLRSFIHKVTPHRCTQGDTDNPPLYCNPKDNSTIRALFPSLGTYDLEKAILNISKAMEQEFSATKQTLEAHQSKVSSLASASRKDHVLDIPTTQRQTACGTVGKQCCLY

SEQ ID NO: 1043 - protein, 423 aa, Homo sapiens
HLLAPVFRTLSILTNQSNCWLCEHLDNAEQPELVFVPASASTWWTYSGQWMYERVWYPQAEVQNHSTSSYRKVTWHWEASMEAQGLSFAQVRLLEGNFSLCVENKNGSGPFLGNIPKQYCNQILWFDSTDGTFMPSIDVTNESRNDDDDTSVCLGTRQCSWFAGCTNRTWNSSAVPLIGLPNTQDYKWVDRNSGLTWSGNDTCLYSCQNQTKGLLYQLFRNLFCSYGLTEAHGKWRCADASITNDKGHDGHRTPTWWLTGSNLTLSVNNSGLFFLCGNGVYKGFPPKWSGRCGLGYLVPSLTRYLTLNASQITNLRSFIHKVTPHRCTQGDTDNPPLYCNPKDNSTIRALFPSLGTYDLEKAILNISKAMEQEFSATKQTLEAHQSKVSSLASASRKDHVLDIPTTQRQTACGTVGKQCCLYI

SEQ ID NO: 1044 - protein, 424 aa, Homo sapiens
HLLAPVFRTLSILTNQSNCWLCEHLDNAEQPELVFVPASASTWWTYSGQWMYERVWYPQAEVQNHSTSSYRKVTWHWEASMEAQGLSFAQVRLLEGNFSLCVENKNGSGPFLGNIPKQYCNQILWFDSTDGTFMPSIDVTNESRNDDDDTSVCLGTRQCSWFAGCTNRTWNSSAVPLIGLPNTQDYKWVDRNSGLTWSGNDTCLYSCQNQTKGLLYQLFRNLFCSYGLTEAHGKWRCADASITNDKGHDGHRTPTWWLTGSNLTLSVNNSGLFFLCGNGVYKGFPPKWSGRCGLGYLVPSLTRYLTLNASQITNLRSFIHKVTPHRCTQGDTDNPPLYCNPKDNSTIRALFPSLGTYDLEKAILNISKAMEQEFSATKQTLEAHQSKVSSLASASRKDHVLDIPTTQRQTACGTVGKQCCLYIN

SEQ ID NO: 1045 - protein, 395 aa, Homo sapiens
LLAPVFRTLSILTNQSNCWLCEHLDNAEQPELVFVPASASTWWTYSGQWMYERVWYPQAEVQNHSTSSYRKVTWHWEASMEAQGLSFAQVRLLEGNFSLCVENKNGSGPFLGNIPKQYCNQILWFDSTDGTFMPSIDVTNESRNDDDDTSVCLGTRQCSWFAGCTNRTWNSSAVPLIGLPNTQDYKWVDRNSGLTWSGNDTCLYSCQNQTKGLLYQLFRNLFCSYGLTEAHGKWRCADASITNDKGHDGHRTPTWWLTGSNLTLSVNNSGLFFLCGNGVYKGFPPKWSGRCGLGYLVPSLTRYLTLNASQITNLRSFIHKVTPHRCTQGDTDNPPLYCNPKDNSTIRALFPSLGTYDLEKAILNISKAMEQEFSATKQTLEAHQSKVSSLASASR

SEQ ID NO: 1046 - protein, 396 aa, Homo sapiens
LLAPVFRTLSILTNQSNCWLCEHLDNAEQPELVFVPASASTWWTYSGQWMYERVWYPQAEVQNHSTSSYRKVTWHWEASMEAQGLSFAQVRLLEGNFSLCVENKNGSGPFLGNIPKQYCNQILWFDSTDGTFMPSIDVTNESRNDDDDTSVCLGTRQCSWFAGCTNRTWNSSAVPLIGLPNTQDYKWVDRNSGLTWSGNDTCLYSCQNQTKGLLYQLFRNLFCSYGLTEAHGKWRCADASITNDKGHDGHRTPTWWLTGSNLTLSVNNSGLFFLCGNGVYKGFPPKWSGRCGLGYLVPSLTRYLTLNASQITNLRSFIHKVTPHRCTQGDTDNPPLYCNPKDNSTIRALFPSLGTYDLEKAILNISKAMEQEFSATKQTLEAHQSKVSSLASASRK

SEQ ID NO: 1047 - protein, 397 aa, Homo sapiens
LLAPVFRTLSILTNQSNCWLCEHLDNAEQPELVFVPASASTWWTYSGQWMYERVWYPQAEVQNHSTSSYRKVTWHWEASMEAQGLSFAQVRLLEGNFSLCVENKNGSGPFLGNIPKQYCNQILWFDSTDGTFMPSIDVTNESRNDDDDTSVCLGTRQCSWFAGCTNRTWNSSAVPLIGLPNTQDYKWVDRNSGLTWSGNDTCLYSCQNQTKGLLYQLFRNLFCSYGLTEAHGKWRCADASITNDKGHDGHRTPTWWLTGSNLTLSVNNSGLFFLCGNGVYKGFPPKWSGRCGLGYLVPSLTRYLTLNASQITNLRSFIHKVTPHRCTQGDTDNPPLYCNPKDNSTIRALFPSLGTYDLEKAILNISKAMEQEFSATKQTLEAHQSKVSSLASASRKD

SEQ ID NO: 1048 - protein, 398 aa, Homo sapiens
LLAPVFRTLSILTNQSNCWLCEHLDNAEQPELVFVPASASTWWTYSGQWMYERVWYPQAEVQNHSTSSYRKVTWHWEASMEAQGLSFAQVRLLEGNFSLCVENKNGSGPFLGNIPKQYCNQILWFDSTDGTFMPSIDVTNESRNDDDDTSVCLGTRQCSWFAGCTNRTWNSSAVPLIGLPNTQDYKWVDRNSGLTWSGNDTCLYSCQNQTKGLLYQLFRNLFCSYGLTEAHGKWRCADASITNDKGHDGHRTPTWWLTGSNLTLSVNNSGLFFLCGNGVYKGFPPKWSGRCGLGYLVPSLTRYLTLNASQITNLRSFIHKVTPHRCTQGDTDNPPLYCNPKDNSTIRALFPSLGTYDLEKAILNISKAMEQEFSATKQTLEAHQSKVSSLASASRKDH

SEQ ID NO: 1049 - protein, 399 aa, Homo sapiens
LLAPVFRTLSILTNQSNCWLCEHLDNAEQPELVFVPASASTWWTYSGQWMYERVWYPQAEVQNHSTSSYRKVTWHWEASMEAQGLSFAQVRLLEGNFSLCVENKNGSGPFLGNIPKQYCNQILWFDSTDGTFMPSIDVTNESRNDDDDTSVCLGTRQCSWFAGCTNRTWNSSAVPLIGLPNTQDYKWVDRNSGLTWSGNDTCLYSCQNQTKGLLYQLFRNLFCSYGLTEAHGKWRCADASITNDKGHDGHRTPTWWLTGSNLTLSVNNSGLFFLCGNGVYKGFPPKWSGRCGLGYLVPSLTRYLTLNASQITNLRSFIHKVTPHRCTQGDTDNPPLYCNPKDNSTIRALFPSLGTYDLEKAILNISKAMEQEFSATKQTLEAHQSKVSSLASASRKDHV

SEQ ID NO: 1050 - protein, 400 aa, Homo sapiens
LLAPVFRTLSILTNQSNCWLCEHLDNAEQPELVFVPASASTWWTYSGQWMYERVWYPQAEVQNHSTSSYRKVTWHWEASMEAQGLSFAQVRLLEGNFSLCVENKNGSGPFLGNIPKQYCNQILWFDSTDGTFMPSIDVTNESRNDDDDTSVCLGTRQCSWFAGCTNRTWNSSAVPLIGLPNTQDYKWVDRNSGLTWSGNDTCLYSCQNQTKGLLYQLFRNLFCSYGLTEAHGKWRCADASITNDKGHDGHRTPTWWLTGSNLTLSVNNSGLFFLCGNGVYKGFPPKWSGRCGLGYLVPSLTRYLTLNASQITNLRSFIHKVTPHRCTQGDTDNPPLYCNPKDNSTIRALFPSLGTYDLEKAILNISKAMEQEFSATKQTLEAHQSKVSSLASASRKDHVL

SEQ ID NO: 1051 - protein, 401 aa, Homo sapiens
LLAPVFRTLSILTNQSNCWLCEHLDNAEQPELVFVPASASTWWTYSGQWMYERVWYPQAEVQNHSTSSYRKVTWHWEASMEAQGLSFAQVRLLEGNFSLCVENKNGSGPFLGNIPKQYCNQILWFDSTDGTFMPSIDVTNESRNDDDDTSVCLGTRQCSWFAGCTNRTWNSSAVPLIGLPNTQDYKWVDRNSGLTWSGNDTCLYSCQNQTKGLLYQLFRNLFCSYGLTEAHGKWRCADASITNDKGHDGHRTPTWWLTGSNLTLSVNNSGLFFLCGNGVYKGFPPKWSGRCGLGYLVPSLTRYLTLNASQITNLRSFIHKVTPHRCTQGDTDNPPLYCNPKDNSTIRALFPSLGTYDLEKAILNISKAMEQEFSATKQTLEAHQSKVSSLASASRKDHVLD

SEQ ID NO: 1052 - protein, 402 aa, Homo sapiens
LLAPVFRTLSILTNQSNCWLCEHLDNAEQPELVFVPASASTWWTYSGQWMYERVWYPQAEVQNHSTSSYRKVTWHWEASMEAQGLSFAQVRLLEGNFSLCVENKNGSGPFLGNIPKQYCNQILWFDSTDGTFMPSIDVTNESRNDDDDTSVCLGTRQCSWFAGCTNRTWNSSAVPLIGLPNTQDYKWVDRNSGLTWSGNDTCLYSCQNQTKGLLYQLFRNLFCSYGLTEAHGKWRCADASITNDKGHDGHRTPTWWLTGSNLTLSVNNSGLFFLCGNGVYKGFPPKWSGRCGLGYLVPSLTRYLTLNASQITNLRSFIHKVTPHRCTQGDTDNPPLYCNPKDNSTIRALFPSLGTYDLEKAILNISKAMEQEFSATKQTLEAHQSKVSSLASASRKDHVLDI

SEQ ID NO: 1053 - protein, 403 aa, Homo sapiens
LLAPVFRTLSILTNQSNCWLCEHLDNAEQPELVFVPASASTWWTYSGQWMYERVWYPQAEVQNHSTSSYRKVTWHWEASMEAQGLSFAQVRLLEGNFSLCVENKNGSGPFLGNIPKQYCNQILWFDSTDGTFMPSIDVTNESRNDDDDTSVCLGTRQCSWFAGCTNRTWNSSAVPLIGLPNTQDYKWVDRNSGLTWSGNDTCLYSCQNQTKGLLYQLFRNLFCSYGLTEAHGKWRCADASITNDKGHDGHRTPTWWLTGSNLTLSVNNSGLFFLCGNGVYKGFPPKWSGRCGLGYLVPSLTRYLTLNASQITNLRSFIHKVTPHRCTQGDTDNPPLYCNPKDNSTIRALFPSLGTYDLEKAILNISKAMEQEFSATKQTLEAHQSKVSSLASASRKDHVLDIP

SEQ ID NO: 1054 - protein, 404 aa, Homo sapiens
LLAPVFRTLSILTNQSNCWLCEHLDNAEQPELVFVPASASTWWTYSGQWMYERVWYPQAEVQNHSTSSYRKVTWHWEASMEAQGLSFAQVRLLEGNFSLCVENKNGSGPFLGNIPKQYCNQILWFDSTDGTFMPSIDVTNESRNDDDDTSVCLGTRQCSWFAGCTNRTWNSSAVPLIGLPNTQDYKWVDRNSGLTWSGNDTCLYSCQNQTKGLLYQLFRNLFCSYGLTEAHGKWRCADASITNDKGHDGHRTPTWWLTGSNLTLSVNNSGLFFLCGNGVYKGFPPKWSGRCGLGYLVPSLTRYLTLNASQITNLRSFIHKVTPHRCTQGDTDNPPLYCNPKDNSTIRALFPSLGTYDLEKAILNISKAMEQEFSATKQTLEAHQSKVSSLASASRKDHVLDIPT

SEQ ID NO: 1055 - protein, 405 aa, Homo sapiens
LLAPVFRTLSILTNQSNCWLCEHLDNAEQPELVFVPASASTWWTYSGQWMYERVWYPQAEVQNHSTSSYRKVTWHWEASMEAQGLSFAQVRLLEGNFSLCVENKNGSGPFLGNIPKQYCNQILWFDSTDGTFMPSIDVTNESRNDDDDTSVCLGTRQCSWFAGCTNRTWNSSAVPLIGLPNTQDYKWVDRNSGLTWSGNDTCLYSCQNQTKGLLYQLFRNLFCSYGLTEAHGKWRCADASITNDKGHDGHRTPTWWLTGSNLTLSVNNSGLFFLCGNGVYKGFPPKWSGRCGLGYLVPSLTRYLTLNASQITNLRSFIHKVTPHRCTQGDTDNPPLYCNPKDNSTIRALFPSLGTYDLEKAILNISKAMEQEFSATKQTLEAHQSKVSSLASASRKDHVLDIPTT

SEQ ID NO: 1056 - protein, 408 aa, Homo sapiens
LLAPVFRTLSILTNQSNCWLCEHLDNAEQPELVFVPASASTWWTYSGQWMYERVWYPQAEVQNHSTSSYRKVTWHWEASMEAQGLSFAQVRLLEGNFSLCVENKNGSGPFLGNIPKQYCNQILWFDSTDGTFMPSIDVTNESRNDDDDTSVCLGTRQCSWFAGCTNRTWNSSAVPLIGLPNTQDYKWVDRNSGLTWSGNDTCLYSCQNQTKGLLYQLFRNLFCSYGLTEAHGKWRCADASITNDKGHDGHRTPTWWLTGSNLTLSVNNSGLFFLCGNGVYKGFPPKWSGRCGLGYLVPSLTRYLTLNASQITNLRSFIHKVTPHRCTQGDTDNPPLYCNPKDNSTIRALFPSLGTYDLEKAILNISKAMEQEFSATKQTLEAHQSKVSSLASASRKDHVLDIPTTQRQ

SEQ ID NO: 1057 - protein, 409 aa, Homo sapiens
LLAPVFRTLSILTNQSNCWLCEHLDNAEQPELVFVPASASTWWTYSGQWMYERVWYPQAEVQNHSTSSYRKVTWHWEASMEAQGLSFAQVRLLEGNFSLCVENKNGSGPFLGNIPKQYCNQILWFDSTDGTFMPSIDVTNESRNDDDDTSVCLGTRQCSWFAGCTNRTWNSSAVPLIGLPNTQDYKWVDRNSGLTWSGNDTCLYSCQNQTKGLLYQLFRNLFCSYGLTEAHGKWRCADASITNDKGHDGHRTPTWWLTGSNLTLSVNNSGLFFLCGNGVYKGFPPKWSGRCGLGYLVPSLTRYLTLNASQITNLRSFIHKVTPHRCTQGDTDNPPLYCNPKDNSTIRALFPSLGTYDLEKAILNISKAMEQEFSATKQTLEAHQSKVSSLASASRKDHVLDIPTTQRQT

SEQ ID NO: 1058 - protein, 410 aa, Homo sapiens
LLAPVFRTLSILTNQSNCWLCEHLDNAEQPELVFVPASASTWWTYSGQWMYERVWYPQAEVQNHSTSSYRKVTWHWEASMEAQGLSFAQVRLLEGNFSLCVENKNGSGPFLGNIPKQYCNQILWFDSTDGTFMPSIDVTNESRNDDDDTSVCLGTRQCSWFAGCTNRTWNSSAVPLIGLPNTQDYKWVDRNSGLTWSGNDTCLYSCQNQTKGLLYQLFRNLFCSYGLTEAHGKWRCADASITNDKGHDGHRTPTWWLTGSNLTLSVNNSGLFFLCGNGVYKGFPPKWSGRCGLGYLVPSLTRYLTLNASQITNLRSFIHKVTPHRCTQGDTDNPPLYCNPKDNSTIRALFPSLGTYDLEKAILNISKAMEQEFSATKQTLEAHQSKVSSLASASRKDHVLDIPTTQRQTA

SEQ ID NO: 1059 - protein, 411 aa, Homo sapiens
LLAPVFRTLSILTNQSNCWLCEHLDNAEQPELVFVPASASTWWTYSGQWMYERVWYPQAEVQNHSTSSYRKVTWHWEASMEAQGLSFAQVRLLEGNFSLCVENKNGSGPFLGNIPKQYCNQILWFDSTDGTFMPSIDVTNESRNDDDDTSVCLGTRQCSWFAGCTNRTWNSSAVPLIGLPNTQDYKWVDRNSGLTWSGNDTCLYSCQNQTKGLLYQLFRNLFCSYGLTEAHGKWRCADASITNDKGHDGHRTPTWWLTGSNLTLSVNNSGLFFLCGNGVYKGFPPKWSGRCGLGYLVPSLTRYLTLNASQITNLRSFIHKVTPHRCTQGDTDNPPLYCNPKDNSTIRALFPSLGTYDLEKAILNISKAMEQEFSATKQTLEAHQSKVSSLASASRKDHVLDIPTTQRQTAC

SEQ ID NO: 1060 - protein, 412 aa, Homo sapiens
LLAPVFRTLSILTNQSNCWLCEHLDNAEQPELVFVPASASTWWTYSGQWMYERVWYPQAEVQNHSTSSYRKVTWHWEASMEAQGLSFAQVRLLEGNFSLCVENKNGSGPFLGNIPKQYCNQILWFDSTDGTFMPSIDVTNESRNDDDDTSVCLGTRQCSWFAGCTNRTWNSSAVPLIGLPNTQDYKWVDRNSGLTWSGNDTCLYSCQNQTKGLLYQLFRNLFCSYGLTEAHGKWRCADASITNDKGHDGHRTPTWWLTGSNLTLSVNNSGLFFLCGNGVYKGFPPKWSGRCGLGYLVPSLTRYLTLNASQITNLRSFIHKVTPHRCTQGDTDNPPLYCNPKDNSTIRALFPSLGTYDLEKAILNISKAMEQEFSATKQTLEAHQSKVSSLASASRKDHVLDIPTTQRQTACG

SEQ ID NO: 1061 - protein, 413 aa, Homo sapiens
LLAPVFRTLSILTNQSNCWLCEHLDNAEQPELVFVPASASTWWTYSGQWMYERVWYPQAEVQNHSTSSYRKVTWHWEASMEAQGLSFAQVRLLEGNFSLCVENKNGSGPFLGNIPKQYCNQILWFDSTDGTFMPSIDVTNESRNDDDDTSVCLGTRQCSWFAGCTNRTWNSSAVPLIGLPNTQDYKWVDRNSGLTWSGNDTCLYSCQNQTKGLLYQLFRNLFCSYGLTEAHGKWRCADASITNDKGHDGHRTPTWWLTGSNLTLSVNNSGLFFLCGNGVYKGFPPKWSGRCGLGYLVPSLTRYLTLNASQITNLRSFIHKVTPHRCTQGDTDNPPLYCNPKDNSTIRALFPSLGTYDLEKAILNISKAMEQEFSATKQTLEAHQSKVSSLASASRKDHVLDIPTTQRQTACGT

SEQ ID NO: 1062 - protein, 414 aa, Homo sapiens
LLAPVFRTLSILTNQSNCWLCEHLDNAEQPELVFVPASASTWWTYSGQWMYERVWYPQAEVQNHSTSSYRKVTWHWEASMEAQGLSFAQVRLLEGNFSLCVENKNGSGPFLGNIPKQYCNQILWFDSTDGTFMPSIDVTNESRNDDDDTSVCLGTRQCSWFAGCTNRTWNSSAVPLIGLPNTQDYKWVDRNSGLTWSGNDTCLYSCQNQTKGLLYQLFRNLFCSYGLTEAHGKWRCADASITNDKGHDGHRTPTWWLTGSNLTLSVNNSGLFFLCGNGVYKGFPPKWSGRCGLGYLVPSLTRYLTLNASQITNLRSFIHKVTPHRCTQGDTDNPPLYCNPKDNSTIRALFPSLGTYDLEKAILNISKAMEQEFSATKQTLEAHQSKVSSLASASRKDHVLDIPTTQRQTACGTV

SEQ ID NO: 1063 - protein, 415 aa, Homo sapiens
LLAPVFRTLSILTNQSNCWLCEHLDNAEQPELVFVPASASTWWTYSGQWMYERVWYPQAEVQNHSTSSYRKVTWHWEASMEAQGLSFAQVRLLEGNFSLCVENKNGSGPFLGNIPKQYCNQILWFDSTDGTFMPSIDVTNESRNDDDDTSVCLGTRQCSWFAGCTNRTWNSSAVPLIGLPNTQDYKWVDRNSGLTWSGNDTCLYSCQNQTKGLLYQLFRNLFCSYGLTEAHGKWRCADASITNDKGHDGHRTPTWWLTGSNLTLSVNNSGLFFLCGNGVYKGFPPKWSGRCGLGYLVPSLTRYLTLNASQITNLRSFIHKVTPHRCTQGDTDNPPLYCNPKDNSTIRALFPSLGTYDLEKAILNISKAMEQEFSATKQTLEAHQSKVSSLASASRKDHVLDIPTTQRQTACGTVG

SEQ ID NO: 1064 - protein, 416 aa, Homo sapiens
LLAPVFRTLSILTNQSNCWLCEHLDNAEQPELVFVPASASTWWTYSGQWMYERVWYPQAEVQNHSTSSYRKVTWHWEASMEAQGLSFAQVRLLEGNFSLCVENKNGSGPFLGNIPKQYCNQILWFDSTDGTFMPSIDVTNESRNDDDDTSVCLGTRQCSWFAGCTNRTWNSSAVPLIGLPNTQDYKWVDRNSGLTWSGNDTCLYSCQNQTKGLLYQLFRNLFCSYGLTEAHGKWRCADASITNDKGHDGHRTPTWWLTGSNLTLSVNNSGLFFLCGNGVYKGFPPKWSGRCGLGYLVPSLTRYLTLNASQITNLRSFIHKVTPHRCTQGDTDNPPLYCNPKDNSTIRALFPSLGTYDLEKAILNISKAMEQEFSATKQTLEAHQSKVSSLASASRKDHVLDIPTTQRQTACGTVGK

SEQ ID NO: 1065 - protein, 417 aa, Homo sapiens
LLAPVFRTLSILTNQSNCWLCEHLDNAEQPELVFVPASASTWWTYSGQWMYERVWYPQAEVQNHSTSSYRKVTWHWEASMEAQGLSFAQVRLLEGNFSLCVENKNGSGPFLGNIPKQYCNQILWFDSTDGTFMPSIDVTNESRNDDDDTSVCLGTRQCSWFAGCTNRTWNSSAVPLIGLPNTQDYKWVDRNSGLTWSGNDTCLYSCQNQTKGLLYQLFRNLFCSYGLTEAHGKWRCADASITNDKGHDGHRTPTWWLTGSNLTLSVNNSGLFFLCGNGVYKGFPPKWSGRCGLGYLVPSLTRYLTLNASQITNLRSFIHKVTPHRCTQGDTDNPPLYCNPKDNSTIRALFPSLGTYDLEKAILNISKAMEQEFSATKQTLEAHQSKVSSLASASRKDHVLDIPTTQRQTACGTVGKQ

SEQ ID NO: 1066 - protein, 418 aa, Homo sapiens
LLAPVFRTLSILTNQSNCWLCEHLDNAEQPELVFVPASASTWWTYSGQWMYERVWYPQAEVQNHSTSSYRKVTWHWEASMEAQGLSFAQVRLLEGNFSLCVENKNGSGPFLGNIPKQYCNQILWFDSTDGTFMPSIDVTNESRNDDDDTSVCLGTRQCSWFAGCTNRTWNSSAVPLIGLPNTQDYKWVDRNSGLTWSGNDTCLYSCQNQTKGLLYQLFRNLFCSYGLTEAHGKWRCADASITNDKGHDGHRTPTWWLTGSNLTLSVNNSGLFFLCGNGVYKGFPPKWSGRCGLGYLVPSLTRYLTLNASQITNLRSFIHKVTPHRCTQGDTDNPPLYCNPKDNSTIRALFPSLGTYDLEKAILNISKAMEQEFSATKQTLEAHQSKVSSLASASRKDHVLDIPTTQRQTACGTVGKQC

SEQ ID NO: 1067 - protein, 419 aa, Homo sapiens
LLAPVFRTLSILTNQSNCWLCEHLDNAEQPELVFVPASASTWWTYSGQWMYERVWYPQAEVQNHSTSSYRKVTWHWEASMEAQGLSFAQVRLLEGNFSLCVENKNGSGPFLGNIPKQYCNQILWFDSTDGTFMPSIDVTNESRNDDDDTSVCLGTRQCSWFAGCTNRTWNSSAVPLIGLPNTQDYKWVDRNSGLTWSGNDTCLYSCQNQTKGLLYQLFRNLFCSYGLTEAHGKWRCADASITNDKGHDGHRTPTWWLTGSNLTLSVNNSGLFFLCGNGVYKGFPPKWSGRCGLGYLVPSLTRYLTLNASQITNLRSFIHKVTPHRCTQGDTDNPPLYCNPKDNSTIRALFPSLGTYDLEKAILNISKAMEQEFSATKQTLEAHQSKVSSLASASRKDHVLDIPTTQRQTACGTVGKQCC

SEQ ID NO: 1068 - protein, 420 aa, Homo sapiens
LLAPVFRTLSILTNQSNCWLCEHLDNAEQPELVFVPASASTWWTYSGQWMYERVWYPQAEVQNHSTSSYRKVTWHWEASMEAQGLSFAQVRLLEGNFSLCVENKNGSGPFLGNIPKQYCNQILWFDSTDGTFMPSIDVTNESRNDDDDTSVCLGTRQCSWFAGCTNRTWNSSAVPLIGLPNTQDYKWVDRNSGLTWSGNDTCLYSCQNQTKGLLYQLFRNLFCSYGLTEAHGKWRCADASITNDKGHDGHRTPTWWLTGSNLTLSVNNSGLFFLCGNGVYKGFPPKWSGRCGLGYLVPSLTRYLTLNASQITNLRSFIHKVTPHRCTQGDTDNPPLYCNPKDNSTIRALFPSLGTYDLEKAILNISKAMEQEFSATKQTLEAHQSKVSSLASASRKDHVLDIPTTQRQTACGTVGKQCCL

SEQ ID NO: 1069 - protein, 421 aa, Homo sapiens
LLAPVFRTLSILTNQSNCWLCEHLDNAEQPELVFVPASASTWWTYSGQWMYERVWYPQAEVQNHSTSSYRKVTWHWEASMEAQGLSFAQVRLLEGNFSLCVENKNGSGPFLGNIPKQYCNQILWFDSTDGTFMPSIDVTNESRNDDDDTSVCLGTRQCSWFAGCTNRTWNSSAVPLIGLPNTQDYKWVDRNSGLTWSGNDTCLYSCQNQTKGLLYQLFRNLFCSYGLTEAHGKWRCADASITNDKGHDGHRTPTWWLTGSNLTLSVNNSGLFFLCGNGVYKGFPPKWSGRCGLGYLVPSLTRYLTLNASQITNLRSFIHKVTPHRCTQGDTDNPPLYCNPKDNSTIRALFPSLGTYDLEKAILNISKAMEQEFSATKQTLEAHQSKVSSLASASRKDHVLDIPTTQRQTACGTVGKQCCLY

SEQ ID NO: 1070 - protein, 422 aa, Homo sapiens
LLAPVFRTLSILTNQSNCWLCEHLDNAEQPELVFVPASASTWWTYSGQWMYERVWYPQAEVQNHSTSSYRKVTWHWEASMEAQGLSFAQVRLLEGNFSLCVENKNGSGPFLGNIPKQYCNQILWFDSTDGTFMPSIDVTNESRNDDDDTSVCLGTRQCSWFAGCTNRTWNSSAVPLIGLPNTQDYKWVDRNSGLTWSGNDTCLYSCQNQTKGLLYQLFRNLFCSYGLTEAHGKWRCADASITNDKGHDGHRTPTWWLTGSNLTLSVNNSGLFFLCGNGVYKGFPPKWSGRCGLGYLVPSLTRYLTLNASQITNLRSFIHKVTPHRCTQGDTDNPPLYCNPKDNSTIRALFPSLGTYDLEKAILNISKAMEQEFSATKQTLEAHQSKVSSLASASRKDHVLDIPTTQRQTACGTVGKQCCLYI

SEQ ID NO: 1071 - protein, 423 aa, Homo sapiens
LLAPVFRTLSILTNQSNCWLCEHLDNAEQPELVFVPASASTWWTYSGQWMYERVWYPQAEVQNHSTSSYRKVTWHWEASMEAQGLSFAQVRLLEGNFSLCVENKNGSGPFLGNIPKQYCNQILWFDSTDGTFMPSIDVTNESRNDDDDTSVCLGTRQCSWFAGCTNRTWNSSAVPLIGLPNTQDYKWVDRNSGLTWSGNDTCLYSCQNQTKGLLYQLFRNLFCSYGLTEAHGKWRCADASITNDKGHDGHRTPTWWLTGSNLTLSVNNSGLFFLCGNGVYKGFPPKWSGRCGLGYLVPSLTRYLTLNASQITNLRSFIHKVTPHRCTQGDTDNPPLYCNPKDNSTIRALFPSLGTYDLEKAILNISKAMEQEFSATKQTLEAHQSKVSSLASASRKDHVLDIPTTQRQTACGTVGKQCCLYIN
